United States Patent Application Publication US 2026/0191916 A1 - sequence listing, part 5

SEQ ID NO: 2 - DNA, 5171824 bp, Parabacteroides distasonis (residues 3,447,885-5,171,824 of 5,171,824)
  source 1..5171824: mol_type = genomic DNA
gctttgccctaaacggtttatcttcctaagtccctttccgtttttatcgaaaacaagaatatccccatcactgccccgattcgtcaccagcatgatatcctttccgatcgctttcacggcacctttagttataaaatcatccgtggtttccaacgcaatgtattccacgtccataagatcttgaagtatcaattccttttccggataatcggccatgacatcaacccttataaggttatcgacagaggaagcggaccgattgccacatcccatacatccgactaaagcgagtagcatagccactgcgttcgtagttaattttctcatttttataatgtttaaagtctttcgttcgatgtcatttcttgctctttagcgctttctctttgttcatcatccgtatcatctcttttacctcatcggatgtctccggcagttgttggatcagagattggagttcatctatagaaagctggcttttccggttatctggagccagcatggtttgctccgtgataccccgtttggacatatccgaatttaatgactccaagaaaggccgggtaaaagtcaggttactcagatccgactcgtttttcaacagttccttcgcgtaagtcacttgagcgaatacacctctctgtagctcctccgcattcttgaatccggagatatccggatggctatataggttcgcgatctcacgaagcaattctacacgagtacccttcaccttccacgcccgataaagcagacgggccgcctcctctatcttacccgagcttctggcgctcatggcacgaatctccatgaccatctccgattcctccggcaattgattgatcaggttacgcaaatccacgatagagatcttgctctttttcccatccgggtctatcatagtctcctccgccacattacggaaaaacatatcctcatagaaggattgcagaagcgcccggctaaacaccatcgtcctctcgtccgcttttttctttaagctctcattcatataaagtaccaagataaaaagacctcgctgacgatcctcctcgctctggaatttagacacgtcaatctcactatacatatgcgagatcgccgccaggaaatccagtcgttccggattcttcttccatgcctcatagtagagacgggacgcttccttatatctcccgtctttttggtaagtctccgcacggaaggccaataattgatttaccaagaaacgattgggttccaatcccttttccgcccggtcaaataagtcgtaagcccgcttccggtcatacgtcttacccaaggcggaacccaataagaggcatacctcgaccgaggtcgtatcctgctcatatgccatatccaagatatctaccgagggcatatacagaccggcataatacttcgaggctcccccatatttcaaggtaaggtaggtggaatcaccatcagccaacaaactggaatagacagaatccgcctgaacaaattgtttcacgatatatagccccaatcctttactacgcaataattgacgattcccgggattataaaacaaggcggtatcgcaaatcgctattccttccgatatataatccgggctactagcccccatccgatacaatgaattcactaacgcaaccgccaaccccgcattctcacgattcaagttatacgcctgaaaataagcggtcgtagcagaaggatattgttccattcgagtatagcaatcgccaatcgcacggtataagacagtattatcctcattctgagcttgcaatttctcataggcatcaactgctttctcatactcccccaattggaaatacagacgtgccaactgataattagcgtagaagttcgagctatcggcggataagacctgatgaaaatatcgctcggcatcctccgcacggcctaagttcgtcgccgtccgagccaagatgtttaagatatccaagttcgtcgtatccatagaaaagcaaagacggtaatagtcataagccttctgataccgaagcataccctcataagcctgcccgatagcgttcataatctcataattcgaagaatcggctaatgtaaggctatcagcatgagcgatcacagccgcatattgcttacggttcaccaagtcttgccaattaaactcttgagcattcccgggaaaaataaggcaacaaagtaacagaactgtaactaaattacatttctcattcatatctgtatgtttttaagattactgattaagcgaccaacatagcctctattcttatttcactgtaaccggaaagtaataggcaccgtatataagacgcggaccgcctttccgtcctgacgaccgggagtccaccggggcatcattccgatgactcgcaaagcttccgcatccaaagagggatctatcccccgtatgattttaggttccacgatatttcctttcttatctactacaaacgaacagatcacacgaccttgcactcccgcttcctgcgcatctgtcggatactttatgctttgagcgataaacttcaataattcacgatcccctccgggatattgcggcatcacgtccactaccgtcaaagtctcttccttcgcttcttctaccggacttttcaaacggaacgtaatcgggaccgtatatttcacggcgaccgcctttccacgttgcattcccggattccaacgaggcatagtgtttattacccttacggcctcctcattcaataaaggagtcactccccgaagcacctccggattattgacggaaccatcacgcccaacgataaacgagcagattacacgcccttgctccccgttatcctgactctctttcggatactttatattcgtggctatgtatttcaacaactccgcatccccacccggaaaactaggcatcttctctaccacggtaaatacttgctcgttcatctcacgggatttggaagataaggacaaatgggtattatttgtcatatcagcagccaagacctcttgagactcccttccttgatagctgcatcgcaaaatcgcattcgcagggacctccaaagagaaagcccctttcctatccgtgatagtcctctctttaccgcccttcaccacaactgatgccccgatcaaaggctgcccggtctcatcaaccagaatgcccgtagccgtcaccatagcgttcgagaccgtagcctcattcgccagacggacagtcaaacgggctaccgcctcgatattacttaacagcatcaagatccctaccaatggaataaatatcagatatttcgtacgtacgatacccgggctccgcttcttgttcatcatcataatccggttcttcagatgcagcacattgaaactattatacaaagtagtaacggactgatgatgagccaatcccaataaatggtattgatagctcttactatcgtaaccagactggatcaccgtgttatccgccagatactccagattatgcctaacctcacgcttcaataaccatacaaaaggattaaaccagcaagccatacacatcatctcgctcaagatcacgtcaatcgagtgccattgggatacgtgcgtacattcatgtgtcaatatctcatccgtttccttatccgaatgactctccggatgcaagaagaccatacggaaaaaggagaatggcccggcggccttccgcaacgcataaaccggagtttcatgaataacaacacgctcactggtatgagccaaccataagatactgcttaattgcacgagaaaacgtccgcataagaacgctacgatcccccaataaataaaccccaaagatcccagcaaccatccataccaatccacggacgccgcagcatccgctttcgccgtcgcctcaggcaacatagcggaatacatataaatcacatctgctataggctcttgttgccttacccaatcttggatgttcagcaaaggataaaacagagccaagccaaagaacgccagcaatatcgcacgacgtagcttgaagaacgtgtccttatagaagaacaaccggtagaaggcgtaaaagagtacaaaggctacatttaccttcaataagtaggcaaattccggtgtcatggtatgtgggatttaggttattcttttcctttctcaatcaaatcgatgatatcctttagatcatccgtagagattttctgatctttcgcaaagaaagaaaccatttctttatacgagttagcgaaataattcgttaccacgccgccaaggaacgtacgtttatattccgtttcctctatcaaaggacggtattcatacgtatttccataacgtttcgccttcacgtacttctttcgctccagattcttgatcacggaagcgagcgtcgtataaggaggtttcgggtcctcgtatttggccagcacatctttcacaaaacaaggaccgatccgccaaatccagcgcatcgcctcttcttcctgcatcgttagcttctccataaatcttatccttttattaatgtatatccacaaagctacgaaatagtcgtaaacggcatgcggaaggcacgttaattaacattaaataagaatcacaagacctgcaatcgtgaattattgcaacttaaatgtgatcggcaccgtatatttcacggctaccggctcgcctctttgcgtgcccggtgtccaacgaggcatcatttgcaaaactcgaaccgcctcttggtctaatgccggggagattcctctaatgaccttgtaattcgtaagtgttccatccttcgttaccacaaacgaacaaatcacacggccttgctctcctttgttttggctttcttgtggatactttacattcttggctataaatttcaaaagctccgcatcaccgccgggaaacttcggcatcacctctactaccctaaatacctgctctccattttccagcgtatcttcgtcctccgcttccacctgtacttgctcttgtttttctgcctttgttacatctgtcggaacactttcttctttttgttccgaagactgtccgcatcctacgcacatcgccaaagcgaacaggatgatcattgtgttcataatcgcctttttcattttcaatcagttttaatgttatttataccgttattacacatacttaccaacctctaagcatatccggatattacgtcggtttcgcaaacatacgaaatactcgtaatataaatataaacaatatgttaaataacactaatagccatcaaagacatagaaaagataaaagaacatagcttctatcgctagattattacaagaagtacaaccgagcgatacatatcgaagtcaaataagcgaatagaacacaaaaaccggattgccctcctctccttttaagtccaactcctgcggaatcgtgatcgagtgaagcgacttatataagtttagctcatacggggtcactacttgtaccaactcatcttttatgaccctcccccagaccgggaaattccgataacttctcgtaccctgcatgccatgttgaaggttcgcgtccgccagttcatagatagaccccggcatctcgcatttttccacgagtgtctttcccgtctttttatccacagaggcgatataatagccttggttatacaataaacggaaataataatgtgccggaaactcaatcatatcttgcacaaagatatccttggggtcttttttttcaattcgcaaattactcatgtccgtaacatccaacgaacgaatcacttccgcatccgagtttttcagatcaaggacacaagccgcacttattcgatccgccgagatacagaagaccgtatcattactaccggtcttaaacaacacggagttttgcgcatcagaataagcggaggcgatacttgtcgtgaacccgctcttctcatggggtaataaaaaggaataaaaatcattcttgatcgctatcgtatcccctttcctcgaaaataggcccaatccgaatccccctccgttgaaaggctgaaaagggaatgatatggcggcgaaacgatcctttccgatatgacgcatatagattaccgaatactcatgggtggattgtccgataaattcaccttctaacgtatattcccaaactcgattattactaaataaaaaaaggcgatcattacgttcgtccacttggatacatggcagaataccgctaaattcacccggcccctgcccttcttttaccaacgtccggataaaacgcccttgccgatcgaacaggacgatacggggctcttttacgggaagcacatagatatatcgatctgtcacggcataatcataaactccgtctatcaacgaggcatcatccgtggtcacctctaaagggacaaaagtaacccccttgatctcatcgcctaattccaatagccccggtttatccatcccccctcttatatccgcggttaaaagagaggacgcttccgttggcgaagaaccgcatgacacgaaacaagaaacgacaaaaacactatttaaataaaacaagatagaggctaactttacacttttcataaccatgcttttttgcctccaaaaatatcccgtatatctcacaaatcacataataaatgagaacaaaaatgagaacaaacctgccaagaccgctataaatatataataatcaaaagtttgatataaactccacaaatgcctccgtagaaccttctttcttaaaaatcttccggaatagacgaggacgaagtaccgaactattatatttcaatacccgtgtgatctggttggcgggaacaccgattttcgtgagcatacaggccttcaactccgtatcggaaataacaggatatagctttttcagccgtaaggtaaagtcatcataagccttattcaacaaaacctccaaaagctcccaatcctcagagataatcttgccggcatcccgatcgtgaaacttctcatagacctccgatttccgcaagatcgcgacagataataaatgcttactctccttattaagaatcgactcgttacaaatttccagccgttgtttttccaattgtaaggaaaccaacatcaactcttgatccttttcttcctttattttcgtaattcttttttccaaaagggtgatttgccgttcattctcttctttttcttctcgcatacgttgttgctggctagcaatcgaacgtcgcaaggcttcttcccttcgaagagcgttttcctgcgtatttctccatcgccgataaaggaggaagcaaataaataggattatgccgataataaatgcgtacagataacgctcctgtcccctttgtaatagcatcaactctttcttagacaagtcctcacggatcggccttacatcatagcgggaagtgatctgataaatcgattctctcgctgatagtgatccgatagaatcccgtaacatctcgtatttcttgacctcggtcagtatccggtcttgtccggccgcatcgttcaataactgatattgagcactcgcttttctcaaaaaagacatagccttgccatataattcctgctcggcgtacagcatccccatttggttatataaccttccccagaattcataatcccaattctctccctcatattccaacgcacgtaaatagcattccaaagctagggacggttgatccatatcctcatagactttcccccggtaaaaccaagctttgggaggccagtaacagcctcgtgtcgtcctataataatccgtagcgatagagattatggaatccgatgtatgcctcaatcccgcctcatcccgtgattcggtccataacagacaataacgggctttctctcgaagcgataatccattgatatccctcactttctctaataacaccaaagcactgtccggatgatgcggaatcaatttctctacctgccagaacaggttgccatgcttgtcgctcctatatgaaaaaagcacaagaaccaagatcacgatcgtaaataataagatcgtaaacttgatccctatggaaaaatgccgtgacccattcaaatccttacgcatataggcaaatgtatataaattattcataaggaaagccttttccttccgcattattccatgtgtcgggacacatgccctgacctctcccattaatgcagaaatatttctttaatcgtttgcgcaatatatggatttagcatacctttgcgtgataattacatagtttaagtagaaatttctaaatacaattaaataacttaaattattatcttatgtggttacttaattcttctatcgggaagaagctgataatgagtatatcaggcctctttcttgttctgttcttattgttccacctgtcgatgaacgtggcggccgttttctccggagaggcttataacatggtttgttcgctgttgggctctaattggtacgctgtggcagctactctcgtattggccgcaggcgttgtgatccacttcgtgtacgctatcattcttaccttgcaaaaccgtaaggcacgtggtaacgaccgttacgctatcaacgctcgtccgaaaggcgtggaatgggcatctcagaacatgttcgttttgggtttgattgttatcctgttcatgctgttgcacttcagccagttctggtataagatgatgttcgccgaattgatcggtcatcacgaagttgcattggggtcagctatggtatctccacaagacggagccgcttttatcaactattacttccaaggtaatgccgtgatcactgttctttatttgatctggtacgtggctttgtggttccacttgactcacgggttctggagcgctatccaaacaattggttggaataatacgatctggatgaaccgttgggaatgtatctctaagatcgtagctacggttatttgcggacttttcgcgatcattactatcatcttcttcctaaacggagtaggtgcttaattgcaagctacaggttttataattaagaacttttgaaattaaatcattatgtctgaaataaattctaaaatacctcaaggcccgttggctgagaagtggactaattataaaaatcaccagaaattggtgaaccccgctaacaagcgtcgtttggatgttatcgtagtcggtacaggtttggccggagcttccgctgccgcatctttggcagagatgggattcaacgtattgaacttctgtatccaagattctccccgccgtgcgcactctatcgccgctcaaggtggtatcaacgccgctaagaactaccagaatgatggtgactctgtttaccgtttgttctacgatacgatcaaaggtggtgactaccgtgctcgtgaggctaacgtttatcgtttggctgaggtttctaactcaatcatcgaccagtgcgtggctcaaggcgttcctttcgctcgcgaatatggtggtttgttggataaccgttcattcggtggcgctcaggtatcgcgtacgttctacgcccgtggccagacgggtcagcagcttttgttaggcgcttattcagcgttgagccgtcagatcggtttgggtaaggttaagatgtacactcgtcatgagatgttggatgtagttaaggtagacggtcgtgctcgtggtatcatcgcccgcaacttgattacaggtaagatcgagcgttacgccgctcacgctgtagttgtagctacgggtggttacgttaatacgttcttcttgtcaaccaacgctatggcatctaacggttccgccgcatggcaatgctacaagaaaggcgcttacttcgctaatccttgtatggttcagatccacccgacttgcgtaccggtgaaaggtgacttccaatctaaattgactttgatgtccgaatccttgcgtaacgacggccgtatctgggttccgaagaaactggaagacgctaaagctctacaggccggaacgaagaaaggtaaagatattcccgaggcagaccgtgattattatttggagcgtcgttatccggcattcggaaacttggttcctcgcgacgtggcttctcgtgccgctaaagagcgttgcgacgcaggtttcggcgtgaacagcacgggcttggccgtattcttggatttctccgacgcgatcaatcgcttgggtaaagaggtcgttaagcagaaatacggtaacttgttcgatatgtacgaagagatcacgaacgataatccatacgagactccgatgatgatctacccggcattgcactactcaatgggtggattgtgggttgactatgagttgatgacctccattccgggtctgttcgctatcggtgaggcaaacttctccgatcacggagcgaaccgtttaggtgcttccgctttgatgcagggattggccgatggttatttcgtattaccatacacgatccagaactatttgtccgaccaaatccaagttcctcgcttcagcacggatctgccggagttcgtcgaggcagaaaaggccatcaaggatcgtatccaaaaattgatgaacgtcaagggtaaagaaaccgtagacactatccaccgcaaactaggtcatatcatgtgggaacatatcggtatggcacgcgacgcaaaaggtttgcaagaagctatccagatgctgaaagacttgaagaaagagttctggagcaacgtattcatcccaggcaacgcagacaacttgaataccgagttagagaaagcattacgtgtagccgactttatcgagatcggtacattgatggcacacgatgctttggaccgcgctgagtcttgtggtggtcacttccgtacggagcaccagacagaagaaggtgaggccttgcgtcatgacgataagttcatgtacgtatcttgctgggagtaccaaggcgaggacaaagatcctgtcatgttgaaagaggatttgaactatgagttcgttgttcctcaaacacgtaactacaagaagtaataatcatcaatctcagaaaaaattagaatcatggataaagatataagtgtaacacttaaggtttggcgtcagagaggtccgaaggagaaaggacagttcgagacatacaaaattgagaagatcaatcagagtgtctctttcttggaaatgttggatatcttgaacgagcagttggtcaacgagggtaaggaaccgatcgtattcgatcacgactgccgcgagggtatctgtggcatgtgttcattgtatgtaaacggacacccgcacggaccggcaactggagctacgacttgccagttatatatgcgtcgtttccacgatggagagacgatcacgatcgaaccgtggcgttccgcaggtttccctgttatccgcgacttgatggtagaccgctacgcttacgacaaaatcatccaagcgggtggtttcacatctgtcaacacaggtggtgtacccgacgctaatgcgatacctatcccaaagaaggacgcagacttagccatggacgctgccgcttgtatcggttgtggcgcttgtgctgccgcttgtaagaatggttccgctatgttattcgtatccgctaaggttagccagctggctttgttgcctcaaggtaaagtcgaggctgctcgccgtgccaaagctatggtcgctaaaatggatgagcttggcttcggtaactgtacgaacacacgtgcttgcgagatggaatgtccgaagaatatctccgttagcaacatcgctcgtttgaaccgcgagttcatttgcgctaaattacaagactaatatttgattagtatatcatggaaaaggcgtctttctctaaaagaaaggcgcctttttgtttttgttatatgtcgtaaaacataatttagcattataacccttgacaggaattgaaaagtccgtatatttgcatcgtggttttttcataatagtattagatttaaggttaacaaagtttggttagggcttgtcgtgagacaggctttaattgtttatagacctaccttttaaacatggaccataaaatactgcaaatagagattgtttagcgtcattttatcgtcgatctttgcctttaaagatcatatagtatatgctaataagtattttatttggcttcttatgttattttctccgggtgttgatcaaacacaaggaaaaaatcatgcgccagataagacaaatggtaaaacaaaaataaaatggacaaaaaacgaaccaccagttctttcagggcaatgagcacggaaagaaaactcgagtcgatcttccttttcgtaacaggccgatgcaacgccaaatgcgcaatgtgtttctatgcccaagaaatggataagaagcaacccgacctcactttcgatgaaatcaagaagatatcagaaaccgccgggcaattcaatcgattatggatatccgggggtgagcctaccttgcgtgaggatctaccggaaatattggagttattctacaaaaacaaccatatcaaagatgtgaacatccctacgaacggcttaaaaccagaccggatcgtcgaatgggtaaaacggttccgccagaactgcccggattgtaatattaacgtaagcctttccttggatggtttcggtgcgacccacgatacacagagaggcgtaccgggcaacttctataaggccttggaaaccctgcgtaagatacaggagaatttcggagatgacggcaaagtcttaaaaaatatagcaaccgttatcacgaaatacaatatagaccagatagaagacttcatgacttgggtatacggacgtttccgcacctccacgcatacaattgaggctgccagaggcatgacccgtgacgatggcgtgaaaatcctaaccgagtcaacgctacgcaaaatacaagatgacatatcccctatctattcagcttatgcggatcggatggtagcggataccaccggcttaaggaaaccgatcacacgcttcttctatctcggccttatacgtaccttatataatgtgcgtgccagcaacatagatcacccgaccccttgggggatggattgtacggccggagagactaccttggtaatcgactacgacggacgttttcgtgcctgcgagctacgggaaccgctcggaaatataaaagagtacggttgcgatataagtaaagtgatgaatagcgaagcgatgaaacaggaaatagccgctatcggacatgggtataaagccaactgttggtgtacgcacggctgctggatcacctcatccgtcattttcaatccacgtaagatgattcgctccgtatataaaggataccgggaaacgaaacgattgaatcatcccttagccatcaatgagcagaaactacaaacgatggaagccaaataccatctggacattgagcgtttgcgtcaactgaatatccggtaaacaagaccctcatagcccataaataaacgtagcatgaaaatactattagtaaccagaggctcacaaggcgacgtccttccttatttggccatagcggccgaattggaaagacgtggccatgaggtgaccatcaatctccctcaaatattcgaggagaccgttaaaccctacggatttaaatacgtattgcagcagtttgacgatatcggcagcatgatcgatagcgcagcgcaaaactcacataaattccggccattccttaaatggatgaggaacgtgatcgataaacagttcgatcaattgattcccctactaaaagagcatgatattttagtatcgaccaactcggaatttgctgtcgcaagtatcgccgagtattgcaagaagcccttgatacgtaccgcctacgccccgttcttgccgggtaagaagattcccccggccgtattgccatttcccaaacccaacccgatcatcacccccgccatcctatggaagttgatgaaccggatgaccaatttcatggtcaaagacacgatcaacaagaaccgggctaaatacggactcgctccgattcgtaattttggttatcatgcgggagagcgttcatataattacttgcttttcagccagcacctaggaaacatagatccggactggacgttcaaatggtcgatcggaggctattgcttcaatgacacttttcaatatgatgagaaggcttacgaggaaatgatatcattcgtcgacagcgctcaaagccctattatcttttttaccctcgggagttgtagttccaaggatggtaaccgttttagcaaagccttggtcgatatttgcaagaaacatgattatcggctcatcatcggttccggttgggcaaagacaggaatcaccttacaagcggataaacatttattcttaatgaagcagccggttccgcataatttgatatttcggcactgcgacggcgttatccatcatggaggttgcggcacgacccatagcgtaggaagggcgggaaagccccaattaatcactccgttgattatcgatcaaccctattggtcctatcgaatccaccaattagggttagggccggaagggcttaagatagcgaaagcgagcgagcaggagatcgaacgcaaggtttgtgatctggtcaccaatccgctttataagaaaaatgccgctcatataggcgagatgatccaaaaagagggaggtataaagaatatatgcgactctatcgaaagatttcaatgaggcataagttcctattagattttattacatgttacaaaacacaatttagcacttaaactattgacaaataatagtaactccgtatatttgcatcgtggttttttcataatagtattagatttaaggttaacaaagtttggttagggcttgtcgtgagacaggctttaattgttttataaggtctgcttcccgcaaagcccttcgattacatcagaataatccgatgcgtcaataaagttgatatcttgtcttttaagatcttcccattaatcggtttcgccgtataggcatcaaatccactattaatgatccgttgctcatcttgggcgaaagcataagccgtcaccgcgataataggcacgctagcagaaaccttacgaatctctgcggtagcctcgtatccatccatgaccggcatctttatatccatcaagatcaactgaggtttgtgctgatgaaatagctccacagcctcctttccattccatgcatgaatcaatttatattcaggctttaatatagactcaaacaggcgataattactggaattgtcctcagcgatcaagatcgtaacctcacttcgggcgatcttctccaaagtaacaggcttctgctcttcactaggaaataattctttcttcggctgaaaaggcaatgtaaaccagaacctagagcctttcccttccacggaatcaacccctatcgttcctttcatctgggtaacaatcatctcacagatacttaaacccaatcctgttccttgagcgaaagtgttcagtttcacaaaacgtccgaaaatatctttccgtttattctccgggattccgcagcccgtatcctctacatagaaccacaacgtattatcatccttcaacttatagccaaataagatcgatcctgcctgcgtaaatttcatggcattgttcaacagattgatcatcagttgggacagacgatttcgatccgtataaatcacgcaaggctccagataatccttaaatgagatctgtacatccggattcttattcttcaaatgagccgattgctccaaatccctcaatacagcgttaatatccacatagtcataagtaaactccaaggtacccgcctcaatctttgacaaatccaagatatcgtttatcaactgcaacaatagggaattattattctcgataatatcagcgaattccttcttatcctcaaggtcatcggtcgaggcaaggatattagagaaacctactatcgcatttaacggtgtacgtatctcatggctcatatttgctaaaaacgctgatttcaatttattcgactcttccgccttatccctagccattcgaaggtcatgttccaattgcttacgctcggtaatagatatcgtagacccgatcaacgctttcggtttaccggaagcatcatattcgaccattacctgtatctcctcccactcatggcgatcttctcccggaatcaaccgctccagacaatattcttttcgtactttctttattttcccattacacaaatcatcgaaagccttttccacgcaagccctgaaagacgggtgtatcttgctgaaatattccttcaacgaaacctcatgggtatgcacctctgcagtctctatattatctcccggatgtactttcgactcatagataatcttcccttcagccagattatatcgccacggtaaaagatctgccgcctctaacgccatagccagcttatgattcatggctttcaaatgcgtctggaatttatggatatccgtaatatcaataaaaaacgcatcaaccacattctcttccgaggtaggcatgatgataatcgtatagtaaagccctgtcggctcaaaataatactcataagtgaaggattttccactctctaaaaccgtaggcactgccgatagaagcaaaggataactcccgccaatcaaatttgcgatctcttttccacgcttatttaccacaaaatctttaggagcgattttctcctcgaaagcatggttcacatctaaaacctgcacatcgatttgcgtaccttctcgaatcagtcgctgccgtatataaggtaacggcatattattaaataaatcacggtaacgggacaataacctcaactctacttccttcatcttttgcttagaacgatacacgtaatgccacgctaaaaacacgactaccagaaagaatatcagaaagcctaacagttgcatccaatatttttccaagaaagagggaggcgcattcaagtagatcgcatcacgcgggaaattatcttcattagatatcgcacttatcaacgaagcataattcaaatatttatgaggatcatttaccgtcgaaaccgggatcttgcccatatcttcaccgttataaacttgttgtagcaaggggattagagcagtctcaatcgttttagcgctattataatatccaccaatcgtatatccttcttccacacccatatcatataaagaaaaaacaggatgcctagaaataccgtttataccttgatataaagtactatataataacgagtgattcaagaaaggtttctcggtaatccacgagtaatacatcacggctgtcgctcgatgcggatctttctccgacagaaccgccaataaactatccatggagcaagaaccctccgtataaaaatccactttcccctcagggaaagaagtttccatatgtttctccatctcatcccggagccatgtggaaacataacgtctgtcggatatgaaaatcagacgtttcaaacccgggattaattccttcaccaagtcgatcgaacctttaacataataagggataaccaatcccgtagcgttataccccttaaccgcctcttgtaaaggaatcaccctatcagaggaatgccgctgattaaaataacattcattttctgccatttcccccgtctccgaacagaccagagtgggaatatccccccatttctcccggatcttatcccgcataaaagcccatccatttacgcctaagtagataattccatccggcttcttcttgttagcttcaaagaagacctcttgtttctcttttaatttctctggcgtatcaaccaacatcacgcttatatgatctatccggagagtgtactcctccggggtagcgaacttcgagatcatgtttaataaattaccagaccaacgttcgccatccacatatgaatttatcaccaatacatacgattcctccttgaccggatatgaagaactcccataagccggagtcggcataccggctatcaagcataaaatcaatcgaaaataaagtattattgcctttaaatttataatatttcgtatcattccctacattcctctattgcagttgtaaagacaaagatattccttaattatcaactaatcttatcaaactagtttttttatcaagttttggtgtcaaattcacgtttcttacaaactaaaggcttttttaatcgggattattcggttatttaccgatactcgtatagaaatcagcggtatttacttgtgtatagaatgacgaacccgtacatttgataaaaaacaaaaaaatggaacttatggatatgaaagattatgacatcgattttaaagagaagaggacaaacgggtatctgatcgctaccttatttatcattgtcggtatattatttttactgcggaatctaggaatgatagatccatccttatttgacttgcttgtatcttggccgatgctgcttgtcgtgtcgggcatctttacgattttccaccgtaatccggtaggaggcatgctcctcgtaggcgtgggagtctatttccttttcccgcagttaaattggatcacgaacgattttttacgtgtatattggccgttaggattaatcctgttaggattggtcatcatgctgaagcggaaagattctatccgcacgaaaaagcataaacgtccctttaaccatccccctttcgggcacagaaagcctaacgatgagatcaactacgagacagataacggtttcgtatcggttgacaccactttcaactcggtaaggcacatcgtactggaccccgtattcaagggggcggacatagacgtatctttcggcaacgtgattcttgatcttaaaaaaacaacattagaggctgatgaaaccatcataaacatagatagctccttcagcggcgtagtaatatacgttcctaaaggatggctggttcgtctaaaggttggttctttcttggcaggatgccaagatatgagggaactgacagaagcaaccgacatgacgcatacactatacatatgtggagacttgtcgttcagcggccttgaactaagagactaaactcatcatgcaagaacatcctattacaacatccatattacataaagggctgggaagcctattactacttttagccatagcgatccaatgcgcattattaactctttatggcgatcttccgttgagcatcactttggtcgatagcctactttccatcgcattgttcgccgtagcgggatattatctttggtatgtacaatgtacgttacatatcatgcaagcacgagtggctttcgccgtactcgtacaaatcgcttgcatagccggatgctcgatcttgctacaaatattcggattggaagattgggaggaattctcgatcacgattccttttcgattcctgttcggcctaatggcatggatcattctatcccaatggtatgccagtcgggaaagaaagagtgaggcggaacctatcgtgagacaaatggaggaaaagacggcccctcccccgactaccgttccggaggagattctagatcgtatatccgtaaaagacggggcacgtattcatatcatcccgataaaagagatattctatttgcaagcatgtggcgactatgtgaccttattcaccacttccggtcagcacgtaaaggagcaaaccatgaagtatttcgagcgaagccttccttctccggagttcgttcgtatacaccgctcttatatcgttaatacggaacagatattgcgagtagaactattcggaaaagaaacctatcaagtacgattaaaggatggaacctatcttcgtgccagtagcgctggctataagctactcaaagaacgtctttccctttagcagtcctatgaaagggatctaatcatcgttaaaattagaagattttgattgtaatatatagagctttatgttgtgtaacactttttagcaagcatcgacatgttacttaacatatattagttgcaaaagacttgacaaatggtcttgacgaacgtatctttgcatcgtggttttttcataatagtattagatttaaggttaacaaagtttggttagggcttgtcgtgagacaggctttaattgtttatagaggtttgcttccctagatttacatataactataaaaaaacggccacccctaaaaagaggcggccgtaattattcttaatgaaagaacctactctttgacaatccttgtaacttccaaatcaaagatcaaagtcgtataaggctttattatgacacttcccgaagcactccttccagccgaaccgtatcccatctgttgaggaatccaaatctcccaacgatctcctgggtgcatattctgtaacgctgtagcaaaaccatctaccatctcagaaacagtaagctcggcaggggcacctgcctcaaacgatttatcatcaaaaaccgttccatcaataaacgtccctttataataacattccaccttgctcgtataataaatcggctccttactctctcctgtcttcaagaccttgtaaaggataaatccggcattactttgagaactcaactgctcgaaacccggaaccagcatctgggcttgaaaagcctcctcattctggaccttccaaacctcatccacctctagtgcctcatcatccccacaagaggtgatcatgagcacgcaaaacaacatcaacgcaatatgccagtacttcttcattcgtttactctattacctttttcaataaattcttcatgctcaccttctccgtgataatatcgtgaagcttatcgatgcttacgcgctcttgctccatcgtgtcacggaaacggatcgttacgcaattatccttcaaggtgtcatggtctaccgtaatacaatacggggtaccgatcgcatcttgacggcgataacgcttaccaatagaatccttctcgtcgtattggcaacggaagtcgaaacgcaacatatttataatctcctcagctttctcgggcaggccatctttcttcaccaatggcaatacggccaacttgatcggagccaaggctgcgggcaacttcaataccacacggctctcgccattcgccaacgtctcctcgcagtaagaacccgccatgatgctcaagaacacacggtctacaccgatcgaggtctcgattacatacggagtgtaactctggttcaactccggatcgaaatactgtatcttcttgccggagaatttctcatgctggcttaagtcgaagttcgtacggctgtgaataccttccacttccttaaatccgaacggcatctcaaactcgatatccgtagccgcgttagcgtagtgagccaatttctcatgatcgtgatagcgatacttctcatcgcccaaacctagggcttgatgccatttcaaacgagtagacttccatttcttaaaccactcgatctcctcacccggacgaacgaagaattgcatctccatttgctcgaactcacgcatacggaagataaactgacgagccacgatctcattacggaacgccttaccgatctgagcgataccgaacgggatcttcatacggccagtcttctgcacattcaagaagttcacgaaaataccttgagccgtctccggacgaagataaatcttagtcgctccatcagcggtagaacccatatccgtagagaacattaagttaaactggcgaacctccgtccagttacgagttccggaaatcgggcaaacgatctcgcaatccaagatcaattggcgaagatcctcgaagttagactcgttcatcgccttactataacgctcatgaatctcattccatttcgcttgatgctccaatacacgaggattcgtctcacggaatttagcctcatcgaaagcgtcaccgaatttctttgcggctttcgccacttccttatttattttctcctcgatcttgcccaaatggtcctcgatcaaaacgtccgcacggtaacgtttcttcgagtccttgttatcgatcaacggatcattaaaagcgtcaacatggccggaagctttccagatagtagggtgcataaaaatagcggaatcaatacccactacattctcatgcagcaaagtcatgctatcccaccaatatttctttatattattctttaactcaacaccatactggccataatcgtataccgctcccaaaccgtcataaatctctgaggagggaaatacgaaaccatactccttacagtgtgaaactaatttcttaaatacatcttcttgtgccataatctaataatttgccaattttgttaatatgccaatgtgccaatgataagtccatcggagacccgcctgagtgacacattagcacatggtctcctttatgcggctacaaagtaaatgattttttccgtaactatagaaagttttgtatatttacgacgtaaatcgttagtgtttgcgcaaacagtataatttaaacaagataataccatgaaatcagaagaaatctcacgccgctcgttccttaagcgagcgctagccttatcggcagtatcagccatcccgtcgttctggacacccgcccacggacgtgttctacctacttccccgctaatcagcgctaatgaccgggtaaatatagcgttcatcggcatcggacaacgagggggcgagatcgccaaggaattgtataacacaggtctgtgtaacgtggtagctctctgcgacgtggacatgggagcccctcacacgcaagagattatcaacatgttcccgaaagcggcccgttttcaggacttccgcacgatgttcgaccggatggcggacaagatcgatgccgtcagcgtaggcgtgccggatcattcccacttcccgatcacgatcgaggcgatggcgcacggcaaacatgtatatgtagagaaaccgatggcccgcacgttccaagaaatagagatcatgatgcgtggagcgaagaaatacggcgttgtcacccaaatgggtaaccaaggacattccgaggcgaactatttccaattcaaggcatggaaagaggccggtattatcaaggatgttaccgccattaccgcccatatgaataatccgcgtcgctggcacggatggaacccgaatattaggcatatgcctatgggagaaccggttcccgagacgatggattgggacacatggatcggcgtagctcaatatcatgattacaaccatgactaccatttgggacaatggcgttgttggtacgacttcggaatgggtgtcttaggagactggggagcgcatattttggatacggcacatgaattcctagatttaggattgcctacagaaataaatccgctttatttgaaagaccataacccgttcttcttcccgatgtcatccacccttctgtttaaattcccggaaagagggaatatgccggccgtggatatcacttggtacgatggactggacaatatccccgccgtaccggaaggttatggtgtctcggagctcgacctgaatatcccgaccgtagccggagggaagatacaaccggcgaagttgaacccgggcaaggaaatctactcgaaagaattaaccttcaagggtggttctcatggaagtaccttatctatcatcccggatgagaaagcgaaagagatggaatcccgcttaccggaagtgccgaaaagcccgtctaaccatttcgcgaacttcctgttaagctgtatgggtaaggagaaaacccgctcaccgttctcgatcgccggcccattaagtcaggtattctgtctcggcgtattaagccagcgcttgaaccgcaagctcgtcttcgaccgtgacacgaaacagatcacgaacgatccggaggcgaataagatgctatgtggagtaccgcctcgcaaaggatgggaacaatattataccatttaattgaaacatggagaattgaaagttattcgttcatcgctttaactttcaattctctcatatagtttataagcctatttgctacaacatctacaactatccctgcattcatctggtcttaggatgattaactaatggtggtagataaaaaacatctacaattatctagctctatctaccactatttaccgctatttaccacttttccatcacctaacacaacgcttctccacactcaccatatagcattatccgatctcctttcaacacggataaaatattaacatctagccatttgtagttttttaacctaaaaaacaaaagttttattataggaaaacaaaagtttaataagcggaaaacttttgtttctctatagggaaactaaagtttcctcagtatgaaacttttgttacctctaagagaaatgtcttttgcttttaatcccgacgctacgctctgcattttttgttatatttatggcaaatatagaaaaccataagaactaaaagaattttcaaattaccgaaggaaaagtacaaggagtgagaacaactacggaaggggtcttattgtataagggtatttcatgaagaccggaaatccgaacgaacaaggattggacgaataggcaccctatacgaaggaaaaaacattcgtgatgacattccatatcgaataaagtcatcacgaacgccttcaaatatactcataggactccgagaaactcgactgggagctagaagaagccaattcttcagagactaattgatgcagattgccattctgatcataggacttcgtgatccgacgaagctctatgggtttcttctctgtcgggagagaagtataaaccatgatctccatgttcaatccgttctcattgcggtactcgctatatcggagaacctcggacgtttcgggatcacgaatcgtttcttttgtcaacaaccctgtctcatcgtactcatagtccgtataagtaagcttccggccgagttcgtcgtactcaactttccgttccagaagattattcttataagaaaagactgtcaccttgctcttgccaataaccggatattcagtaatcccctttattttccggccttgttcatcatacttataatgaagcgtagacaaattatgatacgtctgatctaggtttctgttgaagtaaacttcttacgccaaaagacaccgaatattcgtcagattcgtatcctatgagtgatttgccgttaaagcttgaacttatacccaaccgtcagactcatcgtattgtaattggcaccgacacttcttacttcatacagagagaaattatcgccatcgatcttatagttaccgccctcatcacctagagagagatcataccccagattcatcacccagttattcacctctataccaaaagaagttgtcaatccccaatcaaaagaattcacgtctcgaaatggatgatcggcgttttcagcctcatcatatcccgaatggccataaccataactataccctaggccagtagatttgacatatttaccaagcgcctgcggctccttcgaataccccatcgtaaacgaagatccccaattcgtatcattcttgacagatacaccggcatacataccgaccgctaaatgcatacgtacctctttcgacactttccatgagaaatcagccatcacgggcaattgcaaaaaatgttgcgtgataccaccggtcatcatctctttcaagacatacgtggcagactccgtcgttctcggataatctcccaacgaataccctctattcgcataatataaaccggatttcagtccaatccatcccggttcaaactggtaagatacaccaacgcctaccttaacccccgcacgccagctagatcccattccaacacgattaaccgcggcaaatccaccctccggagtaatcccccagcgtgattgagcgctcaccatcaagccgctcaaagcgcataacacaaataaaatcagcttcttcatatcatattcttttatatgtaaatatcaattgttattgataagacaaaagattctgaaaaacccctaccacctaaatatttattttataaaatctctttatttaacgcaaactcactctcgtaaaagcctcattcttataaaaactgccgaatatttgctatatttacaccctgttagcaatttggcgtaatagcgttgtgtagaaagaactggattttatgagaccggaagataaagaagacgattatatcgaggataaggaaaacgaggaaattgaggatataaatagtgatacccaagataacgagactacggaggaagaggcgaatacccattccgactataaagtcccggggaaaggggatacacgtgtcacgacctatcatttgtctgggatgtaccaaaactggttcctagactacgcttcttatgtgatcttggaacgggccgttccgcatatcaacgatggactgaaacccgtacaacgacgtatcctgcactccatgaggaggttggatgacgggcggtataacaaggttgcaaatatcgtaggtcatacgatgcagttccaccctcacggagacgcctctatcggagatgccttggtgcaattgggacaaaaggatctgttgatcgattgccaaggaaactggggtaatatcctgacgggagacggagccgccgctcctcgttatatagaggctcgcctttccaagtttgccttggagaccgtattcaatcccaagacaaccctttggcagctttcttacgacgggcgtaataaggaaccggttaccttaccggtaaaattccctttattgctggcacagggcgtggaaggtatcgccgtaggcctgtcttccaagatactccctcataatttcaatgagttattagatgcttccatcgcctatctacggggagaggaattcgcgttatatccggatttccagacaggaggctctatcgacatagccaaatataatgatggagaacggggtggatcggtgaaagtccgtgcgaaaatcggcaagctcgataataagacattggtgatctcggagatcccgtatggaaaaacaacctctaccgtgatcgagtccatcctaaaagcgaacgataaaggaaagatcaagatcaagaaggtagacgataataccgccaaggatgtagagatcttggtgcatctcgctccgggggtctcttcagacaagaccatcgatgctttatacgcctttacggattgtgagatcagtatctccccaaactgttgcgtgatcaaggaggacaagccgcatttccttacggtcagcgatgtgcttcgccactctacggatcgtacgctggagctgttacgggaagagctcaagatccagaaacaagagcaggaggaggccctgttcttcgcctcccttgaaaagatatttatcgaggaacgtatttataaagacccggagttcgagaacgccaagaacatggacgaggcgatatcccatatcgaccttcgtttagagccgttcaagccccgatttatccgtgaggttacccgggacgatatcctgaaactcatggagatcaagatgggacgtatcttaaagttcaactccgacaagagtaacgagttcattgcccagaccttggaacaaatcgccaagatcaacgataagctggaacatatcgtcgactataccatcgattggtttaccatgctgaaagagaaatacggcaaggcttaccctcgccataccgtgatacgcaatttcgacacgatcgaggcgaccaaggtcgtagaggcgaacgagaaattgtatatcaaccgtcaagaaggtttcatcggcatgggactgaaaaaggacgagttcatatgtaactgctcggatatagacgatgtcattatcttctatcgcaacggtacttataagatcgtcaaggtagcggataagatctttatcggtaaggatattctatatgtcaacgtatttaagcgtaacgacaaccggacgatttacaacgtcatataccgggacggtaagttcggatataattacatcaaacgcttcgccgtcacaggcgctacacgcgatcgggaatacgacctgaccaaaggtacggaaaactcccgtgtcctttacttcagtgcaaacccgaacggagaggcggagaccgtcaaggtaatcctgaaacccaaaccccggcagaaactactcgtcttcgaaaagaacttcagcgagatagccattaagggacggggttctcaaggtaatatcctgacgaaagcggaagtgcacaagatcagcctcaagcagaaaggctcttccaccttgggaggccgggaagtatggttcgactgggacgtactccggttaaattacgatggacggggagaagagctaggcgagttccatagcaacgatcagatattggtgatcctgccgaacggcgatttctacgtcacgaattttgaccttagcaatcactacgagtccaatatcatggtcatcgagaaataccagccgagcaagatatggactgccgtattatacgacgcagatcagaaatattattatatcaaacgattcctgctggaggtaaacacccggaagcagaatttcctaggagagaatccgaagaaccgcttgatgttgcttacggatgaggtctatcctcgtatcgaggtgatcttcggaggccatgacgccttccgggaggctctcgtcctcgatgccgacgaatttatcgcggtgaaaggcttcaaagccaaaggtaaacgaatctctacatttgaggtcgagacaatcaatgagctggaaccgaatcgcttcgtcccttccgaaaacgcatcggaatcagacgataccgaaggcaatgaggagggaaacgacactgacgacgggcagagtaccacggatattatcgatgaaattacgggacagatgaaattgtttgacgaataacctatgaaagctatcacctgtttgattggtttgttcctgctgtttctcgcgtcatcggccaaggcccagtccgatggagacgagatcccttggtctatcaacagcgggaccatggtcggtataggaagctacaacctaatggacacctatttatctcccagcatggaagataagaaatatacaggccccggattacgggtaatgaatgaacggatgaagagggtccgactggcaaactatcgggtatccagacagcaaatcataagcgtcgatctggctagcacggataatgctgcctctaccgctacggatttcgcgggctttatcgattatacgttgggttactattatcatttgcccacgctattgccggatctaaagcttctggcgggtggtgccgtgcatggcatgggtggttttatatacaatacccgtaacggaaataacccggcctcggcgaaagcggatatcgatttgaacatctctgccatggcgatctataagttacgcgtcaaggaatatcccatgacgctacgctaccagttcacgatccccttcgccggtgttttattctccccccattacgggcaatcgtattacgagatcttcaacctagggaatgcctcgggagtggtgcaattcaattccttccataataaattcgccatgaagaactttttcacggtagatttcccggtttgtaattttacgatacgggcaggttacctaaacagctcttaccgtacagatgtcaatgggatacagtctcatataatctctcactcttttatgatcggcctcgtgaaagaatttatctctttcggaggaaaacgcctaaagaatacccagcggttcagaagcgcttattattaaaaggaaatcaaatgaaacgataccttatatatatatgtatatctctcggattcctgtttaccggatgtgagaaatcggacgaatacgtggcctccccacaggagaactttgaggcgctttggaaaatattggatgagaattactgcttcttcgaatacaaggacattgattggaacgaggttcacgaccgttataagacgcagataagcgatacgatgaaccaatacgtcctatttgacgtattaggcgatatgctaaacgagctgaaagacgggcataccaatttgatatccaccttcaatatgtcccgctattgggattggtatctcgattatccggataatttcgactcggacatacaagagaattatctcggaaggaactactcgatcgccggaggacttaaatacacgacattgagtgacgggcagatcgggtatatttactacggtagcttttccagttcggccggcgaaagcggtttggatcacatattctatcaattcaaggattgcaaaggtttgatcttcgatatccgggataatggcggtggcatgttatcaaacgccgatcgcatcgcttcccgtttcttggaggaaaagatactgaccggctatatccaacataagacgggtaaagggcacgatgacttttccgaaccttatcccctttatctctcaccttccgagcgtatccgctggttacgccctgttgtggtcttaacgaatcgtcattgctacagcgccgccaacgatttcgtgcagaaagtacgcatgatgccttatgtaacgacgatgggagatcgcaccggaggcggtagtggcttcccctttaactccgagttgcccaacggctggggtgtccgtttctccgcgtctcccatgctagatgtaaacaaacagcatacggaattcggtatcgatcctacatataaggtttctatgacccaagaagatatcgagaaaggtaaagatacgattatcgaggcggcgatcacccacctcttgtccgagaccgagaagaaataaggtttcgctaaaaaaacaacgcaaatatttgcaagtttataaaaaagcattacctttgcacacgattccaatgcggctgtggtgtaattggtagccacgtcagacttaggatctgatgcttcacggcgtgggggttcgagtcccttcagccgcacaaatccagaaatccttgtaagttcgcttacaaggattttttagtatggataaacctcctccatatatacaagcactgtgaagatcaaggattacaaacaacatccaaactgttaattttagaagattttatgcctattctgtatagtttcaaattcaaaaacattttttataccgggcagacatgttgtttaacacaagttatactcaaaacccttgacaaaggggctttacaagcttatctttgcattgtggttttttcataatagtattagatttaaggttaacaaagtttggttagggcttgtcgtgagacaggctttaattatttataggggtttcattcgtttatagatgcttcccggcatcgattttatctttccatccaattccaactcaaagagcagagaagataattgatgtaccggaagattcaaggctacggacaattcattgatatgagattcctttcgcatttccaagaacgacaagatccgttcactctcctcgttctcaggaaataataattgggtttggaccggtaacgcatctgtcttttgagcgacatcccaacgcatcgccatgattaaatcgtcagcgcaagtgatcaagcctcctttattctgccggattaagccattacatcctttagagttgatatccgttacccggcccggaaaggcatagacatcccggccatacgagaaagcgatatccgccgtgatcaaagagcctcctttctccgccgattcaataacgatcgtggcatccgccagaccggctacgatccggtttcgccggataaagttctgccgatccggattcgtcccgctaggaaagtcggtcaataaacctccccgctccaacatctcgaccgccgtagagcgatgcacgggaggatagatacgatccaaaccatgcgccaatacgcccaccgtgggcaattggttcttcaacgcattccgatgagcgcaaatatcgatgccatatgcgagtccgctaacgaccaatagatccgggaaaatcacggacaaatcccgcaataaacgctcggtcacttcctgtccataagtggaggccctacgagtacccacaacgctgatgatatgggcggcgtttaaatccgcgttccccttgaaataaaataaaaccggagcgtccgggcattcccgcagacgttccggataattcatatctttcaagaaatagatagagataccgttcttttgggcaaaagccaattctttctctgcccgtaaaagcacatccgcccgcttaatctcggtgataatcgaatcgccgatacccgatatcttctctagcgactggcgcttttccgtaaacacggcctccgcatctcccaacgcttccagaagatggcgggctaggatatctcccaccccattaatcatagtaaggccaatttggtaaatctgtttgtctgtcatttatgcttgttttgattctattcgctttagcatctcatcgaaatattctcctctggttaatttgccattctctacgacaacggattccacgactcctttagtagccagcgccccatcggattcccggtaaatatcttgctcgaacaccagtttcacccctttcttatatacattcaggcaagaagtataccgatcgccgctccgcaaggagttcttgaactggatatccacacgggccacaaaagcatcgatgcccttctcatgcatggcgccgaagttctcacccaatgactccagaaactcatgccgggtatgctccatataatgctggtaattggagttattcaccacgccttgcaaatcgcactcgtaatcgcgaaccttgtctgtcagtttaaaaatatattccttcattatcgtagttctttttcgatttgtactttctccattttataaagacgatcggacgggcggatcttctcggacatctttatcgagaagcgttcccctttcacggtctcctccaccggtttcaggtctacccggatctcatcgacggtctgcataacggctccggtcgtgggacccgttaccaagatctcatcgcctactctcaaggaaccggactccatctcaaactcggcgacaccgattccgctgaagtatttgataccccgtgccacgtacactttcttacgggtagcaccggagccatatttactgctccattcacccaaccgttgtcccagatagtagccatcccagaaaccgcgattaaagaccctgcgcagacgctcgtcccaaaccgctatcttttcctcatcgaaggtaccttcgcaataagccttgaccgcctctttataacattcggtcacgagacgcacatactccggcccgcgggcacgcccctccagcttgaacacacgtacgccggcatccatcatcttattcatgaaatgaatcgtcttcaagtccttcggcgacatgatatactgattctccacatccagctcgatctggctatccttatcatgcaccgtataggcacgacgacaaatttgcatgcaagccccccggttggcggaagcgttcatctcatgcaaactcaaatagcatttaccggacacggccatgcacaaagccccgtgagcgaacatctctatgcggatcaattcccctttcgggcccttgatctgctgcttcacgatctcctgataaatctcatgcacctgctttaagttcaattcgcgagccaatacgaccacatcggcgaagcgggcgtaaaacttcaacgcctccacgttcgagatattcaattgcgtggataagtgcacctcttgcccgatgctattcgcgtaactcatagcggctacatcggcggcgataatggcggagacacccgcatccttagcggcatctataatctccctcatcaacggaagatcctcaccataaataaccgtattaaccgtgagataactcttgataccatgttcgccgcaaatagcgacgatcttacgcaaatcctccgtcgtgaaattattcgacgagcgagaacgcatattcaatccttcgataccgaaataaatggagtcggcccctccttgtatagccgccatcaacgattcataggaaccgacaggcgccattatttcaaaatccttctctttcaaggttatatattttaatattacggtagcaaaggtacgaataatatttgagaagatttcttataaacgacccacaggccacagaaagaggaaagacaggcaaaagatgtgaaataatttaagacacatgaattcagcgatttattttttgcgcagacaaatattccatctatcaagagatacttcaagaccattccctgcaagagattcttgaacaaggtatatgggagttaatgaaagatgatgggaagataatataaagtactgtctataaacctattgcagcttccttctatttctcgcttaggaaactgtagtttcaaccggatgaaactggcgttacttatagtggaaactgacgttactttaggaactatgagtgtatacaaataaagggagcgtgcggctgacttttattcttcgtcgggtctttgccgaaccttcgatcaattaaaagttcagccaatcgccctttcctttaataaggaaaggaccacaactctacataaagccatataacgcccgccctcacgaaggacatcctttataaattgtcttgaccttttaatctattattaactataaaacaattggcgtatggacgtttgtagccttgaagagattcagaatctttttattttttacgatacttgttttagcaagtatttccctgaattagaattttattgtaatgagaaggaattccacgttcatagtattatacgtaaatacagtgatataaagggagtatgctataataccactcatttcataattgagatgaaacaggaatacgtgatctatttgcctttatcgatcgatgctaaattccgtattttaactaaacagaaaacctattactcgtaatataaccttatttcaatatgcctgaacttattaccatagaagaggccgcccgtatcacgggtttccccagcgaagatatccaatattgggccaaaagccataaaataacctcttactccgtgacgagagacagtcgcctcgtggatctggccaacctgcgtgaattcatctcccatatcgagcatctgggaatacagaaactatacctgcaactgatcatcgaagacaagaaagaagaggccgacgagatcatcgcccaacacgatgatttcctgttctgccttcgatcccttaaaaacatctctcccctccttaaacaaattaccgccgaactagctacattcatacacgacaaacaagatcgatacatattcacggaaataacctcgggcaccaaaatgcaggatgtagccaaacgttgcgatatatcctacgacagattgtgctaccggtataaaaacatagtactccgattacaagagagcaccggatttctggctgaatataagaaaacaatcaagtatcaggatctggagatagagcgtttacggctcgagaacaggaatatggaatacgagttgaaaagcctgtacaaaaaggcacttgaaagcggtttgtatatcgaatctccccgatcactcgtctccataccccaaagtgccgccaaacggatatgccaacccatcactaacctcaccttgtctccctatatccgcaagtgcctcgcgaagctggaaatagaaaccatagaagatctgttacgctacgcgaagaaaaaaggcctcgactcattattggatatgccgggcttcggtacccttggtttggatcagttgaagttccagttggagaagcacaagatcctaaataaagcggggcaatccgagctctatcaatatatcataaatgatccggattattaaaaacacctgttccatctaccgatcatcttacgagatgtaaaaattattccccaaaaagaagtacttttgtaatctctatttagttagcaaacagaaggtatgaagattggttcaatagatttaggggagcgtccggtattcttggcgcctatggaggacgtgacggatatctcgtttcgtttgatgtgcaaacgcttcggagcggacatggtatatacggagttcgtatcgagcgacgcgttgatccgcagtgtgaacaaaacacagcaaaaactaaatgtctccgatgatgagcgtccggtcgctatccagatttacggcaaggacgtagcctcgatggtagaggccgcacgtatttgcgaggaagctcgtccggatattttagatataaactttggttgccccgtaaagaaagtagcgggcaagggagccggggccggcatgctacgcaatatcccgttgatgctggagatcacgagagaggtggtgaaagccgtgaacatccccgtcaccgtgaaaacccgtttgggatgggatgccgacaaccgcgttatcgtggatctggccgagcaactacaggattgcggtatcgccgccctctccatccacggacgtacacgggcgcaaatgtacacgggcgaggcggattggaccttgatccgtgccgtaaaaaataaccctcgcatgcaaatccctatcatcgggaatggcgacgtgacttccgccgagatatgcaagcagcgtttcgaggactatggcgtagacgccgtaatgatcggtagggctagcataggccgcccttggatcttccgggaggtaaaacactatcttacgaccggggaattattgccacaagagcctttctcttggtatctggatatcctaaaaaaacaagtggagcaaagcgtggaacgattggacgagcgtaggggaatcttacatattcgccgtcatctggcagctactccactcttcaaaggtattaccgatttcaagcaaacacggatcgccatgctacgtgcggagactgttaacgaattattcgaaattatgaataacattcctaaaaagtacggaatttcagaataacaagcttgatatatatcaaattgaaacctatttgcgatatctttacaataaaatgttacaaatactattgacgcatattataaaaccccttatatttgcatcgagtttttttcatagtattttagatctaaggttaacaagtctttgcaaggggggaatcgtgagattgtttcattgaggagcaaaaaaagccgcatccatattgggactagcggcttttttgtttttccggactctatatcctaaatcaagaaacttatcgtatctttgtcaataggtcacattaaatatttggcactatgaaccagactatttatcccagtcggtatacagaatttcgagaagattcgcaaggacggagatacccataaactggcctcctccctcgaactgacctatgatgaaacacactccttgctgagaaagcgttacgacggctatcatttcgtagccaacgtaccgggtatctataaccctttcagcctgctgaatacctttaaatatatgcggcctgaagattattggttcgagaccgggacaccttcttatttagtagagttactcaagcacacccattacgacctctatgagctggcaaataccgagaccgatgccgatgtgctgaacagtatcgactcaacctctagcaatcctgtccctgttatttaccaaagcggctaccttacgatcaaggattatgattctcgctttggtatctataaactaggatttcccaatttagaggtagaagaaggctttgtcaaatacctgcttcctttctacaccagtgttagcgccccaaagactcctttcgaaatcgggcgttttgtccgggaggtggaataaaaaagcctatgttttcgcacacacgctatacattattcgaaataaacccttacatttgcgaaaaacataatactataccaccatgagtaagaaagtcataactttcggagagatcatgcttaggctggctactccggactatttacgcttttgccaagccaatcagttcaacgctacttttggcggaggggaagcgaatgtcgccgcctcactcgccaactatggcatagagactgagtttgtaacccgtttaccccaaaatgacatcgcccgtgcctgcgttatggaattacgcaaacagggtatcggaacttccaagatcatttacggaggggaacggttaggcatttattttctggagaccggagcggtcgctcgtgccagcaaggtggtatatgaccgggctcattcttccatcgccgagatccgaccggggatgatcgattggaacgaggtattcaaggatgcctcttggtttcactggacaggtatcacgccagccatatccgaaggtgccgccaacgtatgcttggaagcgatacaggcggcaaaccgattgggcatcacggtatcctgcgacctcaactaccggaaaaatctctggaaatacggtaagacagcccatgaggtcatgccggaactagtagccggatgcgatatcatcctaggaaacgaggaagatgccgagaaagtcttcggtatcaagcccgaaggttttgacgccgccgccacggaaggcgaggtacacgccgcctctttccagtcggtatgtacccaattaatggctcacttcccacgtgcccggaaagttatcatcacgctaagaggctccatcaatgccaatcataacacatggggcggagtgctatacgccgacaaccggttgtacgaatcccgccggtatgacatcacccatatcgtagatcgtgtaggtggaggcgattcttttatgggaggccttatttacggtttgctctcctaccccggtgacgaccagaaagccttggacttcgcggtagcggcttcttgcctaaagcacacaatttacggagacttcaaccaagtaaccgtagaggaagtagaaaaactcatgtccggcgacacctccggccgtgtctcccgctaattttcaattctcaactttcaatttttaattcccaatatggctcaattcaataaaatacaaacattacaggctatcatccaaaccggaatggtgcccgtttattataataaagaggtagagatcgcaaaacaagttgtaaaagcctgttacgagggaggcgtcagagccttcgagtttactaaccggggagatttcgcccacgaggtatttggcgagctggtaaaatacgccgccaaggaatgcccggaattagtattgggcgtaggttctatcgtagacccggccacagccgccttattcatacagctaggcgcaaacttcgtagtcggcccgttgttcaacccggagatagcgaagatatgtaaccgtcgcctcatcccttatacgcccggctgcggttccgtatccgagatcggctttgcccaagaagttggttgcgacctttgcaagatattccccgccggaaatgtaggaggtccctcatttgtcaagaacataaaggcacccatgccatggaccctaatcatggctaccggtgccgtggagccgacagaggagaatctatccgcttggttcaaggccggcgtgacctgcgtaggaatgggatccaaactcttccccaaagaagcgatagcgggaaacgattggcaatccattaccgatttatgccgcaacgccttatctatcattcaaaagtatcgccaagtatgaaaaactttttagatcaagatttcttgctccaaaccgacacggcccgtgagttatatcacgagcatgcggcgaagatgcccatcattgattaccattgccacctagatccccggcaaatagcggagaatcatcaattcgaggatcttacggagatatggcttggcggagaccattacaaatggcgggcgatgagagcaaatggtatccccgaggaatacatcaccggagataagccctcttacgagaaattccttaaatgggcagagacgatgccttacacgatgcgaaacccgctttatcattggacacatctggaacttagccgtatatttggaatccataaagtcttgaatccggcttccgccgaggaaatctacgcaacttgtacggataaactgcgtacccccgaatatcgtgcgcaagccatcatgaaacggatgaacgtagagattgtttgtacgaccgacgatcctatagactcattggaattccatcaaaaaatacgttcaagcggatgccacacccgtgtatatccggcatggcgaccggacaaggtactcgctatcgataatttcaaggcgctaaatgactatttgtccaagctggaggccgccgccgataagaccatcctcacctacaagcatttattggaggcattacaaaagcggcatgatttcttcgccgcccaagggtgccggttatcggaccacgggttggatactttctatgccgaaccttataccgagcaggagattgaggtgattttcctcaaggctcgtatgggtaaatcgctcacggagcaggaagttcgcaaataccgttcggcattgctatacgaattggcggcaatggatgcccggagtggatgggtacagcaattccatatcggcgcaaatcggaataataacaaacggatgttcaagttattagggccagacacgggtttcgacgctatcgatgatcagccggtagctgtttccatgaaccgctttttcagccatttagatcaagaagggctgttagcgaaaacgatcgtttacaacctgaatccccgcgacaccgagttgatggtagccaatgcctacaatttcaacgacggcagtgtacccgggaagatgcaatatggagcggcttggtggttcctcgatcagatcaaaggcatggaagatcagttaaacgcactttccagcctcggtcttttaagccgtttcgtcggtatgctgacagattcccgcagcttcctgtcatatccccgccatgagtatttccgccggatcctttgtaatatgctaggcaatgagatagagaaaggcttattgcccgcctccgagctttccttcattggacagatggtggaggacatcagttacaacaacgctaaacgatactttgatttctgattattgcaacccgcattgcaatgttactgcacgcctgtcgcagtaacactgcacgtgcgttgcagtaaggctgcaacagctttgcaacattttattcacaaacacttcataagaccttccactatactcgcacatattacgcctacttttgcggcagatttagataaacctcaaatccgcaactacgcgcctaatatgatacagaagcgaaaagaatctgcatcgttagtaaaaagggggcacagtgcatcgaatgtcaccataaagacatataaatgccccttaccccaccatgcgacttgaggcaatacgcaaaatcacgactataagttgtcggtgttatccaaagtcattctggaacacattggcataagcattgttgcatgaatagatattcagcacatacttccttgatgtcctgacccatttggctggcacagagatgaacttaaagacaaacgtcttgatgcggcttgttgctttgagtccgaacctcttcacgtcaagcctcgccatgatgaatttatagaagttgcgtatgagtgccataagcagaagaaacaccgtgttttctcccataaaggattttggaagcctgttccagccgaatccgttattcatatcatcgaagatgcgttccttccctccacggaggttatagaattcgacaatctctttctcggaagactcgtagtcatttgtaaggatgcagcggtaggtgtattctccttcccacaggtcgagttcgccgtctatccgcttctgtctttgaatcacaagacggtatgccttccctttccatttctcgatgagaatggaggccagctcaaactcaatgccgcccaattccactttcttccaacctctgagggcaaagatgtcattgtagagcgaactgcatcggttagcacggatatagaaggtcttgcagtgtttagcaatctcttccactatctcttcagaacacgagccgcaatcagctctgaaacggttgataataagcttgttttgttcaaacctttcaaagaacctcttcagcgtgtccttctggtggaaacggacatttgtgttgccgtcgctgttctcaatgccgacaatcaagttgccaataaccgccacgccagggcgataaccaaggaacttcttgtatgtaggcttcgcatcaaacttctcagcctctatgaactggtggtcgaagtcaacgtcatacccctcgccctctttcagctgccctgtggacaataggcaattgaggagcagtgtattcagcttgtctgccgtgttgaagtcgtaggtcttgccagtgtcggatgtgtaggaaatgttatcctgggtcagttcctttatggctctaagaatcgtgtcggcactgcatgtgcgaagtgtcggatgaagcgaaaggtggtacatcagatgagtggtgacatcctcgatgcatgagccgccacaaaaataaacgctcataagcgaacggatgatttcgctgtattgataaccatacagcctgcatctcataccgagggttgagtcgattacagatgagagtctggagtcaaattgctccattattgaaaatattcctccaaaaggagtgagtttctcggatttaattgctacctttgccatgtctgtcgggtttgatacatattttgatttgcaacactaagataggtgaaaaatctgacatggcaaattcctgagcaactttttgttgctcaggtacttaaaaagttatatttgtaatagtgttgcggaattaaggataaacactaaaatacgcaaacatgaaacaacggctttatgatttcatccctgtcaagcatctatgcgtagggatgtctttatgtggcatagtggcaggtacccaaaccgctcaagcttctcccgtcttcgggcaatcatcgggcttagaacttccgagtcccagcatctaccaacaaagtacgaaacagatttccggtatcgtcaaagaccaggcggggattcctgtaattggcgcaaacgtgatcgtaaaagggacgacaaacggagtaatcaccgggctcgatggagatttcctactggaagttccggaaaacgctaccttagagatcagttatatcggttatatgacgcaaagtatcccgataaacgggaaaacgaccttcaacatcatcctagaagaagatacgcagaaattggatgaggtagtcgtactcggttatggagcggggcaacgcaaacaagatctctccgcttccgtgggcgtgctgaacaacacggaagacctggtggcccgtccggttacctctaccgaaagtatgttgcaagggcagttagcgggtgttaccgtacaagcgaacggtggagacccgacagctacaccctcgatcgtgatccgtggacagggctcacagaatggcgataacgtattatgggttgttgacggtgtccccggcgcacccatcgcttctatgaatgatatcgagacgattgtcgtcttaaaagatgctgcctccgccgctatctatggagcgcaatccggagccggaggtgttatcttggtaaccaccaagaaggcgaaagagggcaagacctcgttgagctatgacgcgactttcggtgttcgtaaagctagcaacgtaatcgagccgttaaatgcggaagagcaactcgagatgcgaaaactgtcttacgcaaacgcagggcttacattgccgaccggttgggacttgaccaagaacccatgggtaggtaccacacgtaccaactggatggatgaaatattccgcaccgctttctaccaacgccataacgtagccttgaatgttggttcagagaatgcctccaaccgtgtttcatttgcttacgataatgatgaaggtgtattgatcaatactttcaacaagaacctttcacttcgttacaacggtaaattcaaattgaataaatgggtgactatcaccgaagacgtggtttggaaaaacaacgaaagccgttcaaaagataccgacagtggttatacgggagttgtcgcggcggctatgtatatgcctgccagcgctacggtttacaatccgctggatggtacttacggtggaacaacgaccgaagacccggattacatcgccaaatatggctccaacttcgcggatatccacggagacgctgtcaatccggttcgcttgctggaagcggaaaaccgctatgaccgaaccagcgacatctggagtacgaccagtctggaactagctaatatcgttaccggcttgaagttcacgagccgtttcacttacaacctgaagaataatctatataagaacttcagcccgatccgtgacgaggtgggaaaaccctccttgacaaataatctggatgaaacgacttaccgtgcagacgcatggaaaacggaaaacacattgacctacgacaatacgtttaatgacatgcacaccgtgggtgtcttactatccactacggccgatcattacagcaagcgaggattagaggttaatggaaaagatttatctgacgaatccgcttatttacaatatctatcctatgcgaattccgtttccgcaaccgattatttgaccggtcctgacgcaaacgtatccttgatcgcccgtctggcttattccttcaacgatcgttacttcgttacagcctcttggcgtcgtgattacgcaggccgtctacctaaagataataactatggcgactttcctgccgtaacagccggatggaaaatctctaatgaatctttcttcccgaagagcgagacactgaatttattgaagatccgtgcttcttggggacgtgtcggtaatctaggatctatcggttataattacaaatcagctttattaggtaagaattattggtcggagcaggcacagtacggcgtagaatcgaacaagatttggggaaacttcgtctataactctaccgcattaaatcccaacttaacatgggaaacttccgagcaatgggacttaggtctagatgtgaacatgttcgacaatcgcttgagcatggcattcgactatttcgacaaacgcacgttcaacttgatccagtcgcaaacgatgaactggccgggaacgatcggtatcgatgccatgttagtcaatcaaggtgaagtccgcaaccgaggtttcgaggcgcaaatcaattggaaccaacaggtaaataaagattggtcgtacttcgtttccggaaacttctcttatctaaagaactgggtttctgatattggggtaaagaacgcagacggaaccccgggcgtttggacaggtatcaccaaaaatgatgcatatttcgatggtagttatcgtaaccttccatatatgtatcaaacagccgaaggagaaccgctggcctctttctatctgatcaagactgacggcatttttcaaagcgacgcagaggcagccgcttatgtaaacaaagacggaaaacgaatccaaccggacgctgtagccggcgatttgaaattcgtcgatgccaatggtgatggagtcatcaatgatgaagaccgtcaatactgcggtagcgctacacctaaaactacattctcattctccggaggattcacttggaagaagctttccgtaagcgctatgttccaaggcgtaggtggagcacaagctttatatgtaggtaaatatatggccttaagtgatgtagaaggaaactttaaccgctcaaaagagatcatgaacgcttggagtccgtcgaatacagggtcgaatattccacgcttatcgaaaaacgacccgaatagcaactttagcacaccgtctgattggtatctggagaatgcttcttacttacgtttgaagaacttcaccgtatcctatgacttgagtgatgttatcaggaaatgcgctcacctgcaagaacgcaacagcatgatgtcggtttaccttagcggtgagaacctcttcacgatcacgaactactcaggaatggacccggaaaccggcggttgggatgccttgaagtatccggtttcacgcgtattctctgtcggagtcaaattgacatactaatcgggtgttttaaaagatattcatattaacaaaggatcaaaatgaaaagatatattacagtattagcattatccgcattggtttgtagttcttgtagcgacttcctcgacgttcagccggaaggaaacgcaactacaacctcctatttcttgaatgatcaacaggccattgatgccattgacggattatatgaaagattccatcaagagggttgttacggccgtgagttattctgggaacagggagccgcatgcgacattgtttggggacgtacgcgcggttataactctttggcgaccttagcctataccggtgatgaatctcctctaagagatgtattcagccgtatgtattctactatgtcccgtgcgaattggatcatccaagaattagtgaagaaagaaaagggaacgacgctgaccgccgtcgagaaacgcagcttgggcgaagcttacttcagtcgcggttgggcacattatctgatcgcttatcggtacggtacggataaacaaggagtgcctttcgtacgttacgaggacttccccgacgattacgacaactccataccgcctcagcaagctaccgttatggacaattataaactgatcatcgaagatatggacaaagcaatcgcctaccttccaaacttcgaatcctatgacgctgacaaccggggccgggcacatcaggctgctgccgtggcgttcaaagcgaaaacttatgcttactgggctacttgggatgctacccaatggaacaacgtcatcgagatggtcaatcaattagagaacaactacaatcgagatctagctcccacatttgcggaactattctcgtctgacttgaaagattattggaacgccgaatatctctggactattccgagtatcggtggcgcactaccgggcggtaccgaattcccgggtattatccttgagaacaaaggctggggcaaatataatggttgggggcagatgaagccctcttacgacatctacgaagaaatggcgaaagatggtaaaggtaatgaccgtttagtacgctcaatcttggaatacaaccaagagttcccgttcttcggcgagacacgcaagttctggtctacctccgaccttgaagctggtttcatgatcaataaatacatggacgcgttcaaatactcagaccctgtaggtgaaggagccgtgagtgctaacggagactggcctacggtccgtgtcaatttcccgatcatccgtttcgcagaaatgttattgttccgtgccgaggcatatttaatgacaggccaagccgataaagcaaccgcagatatcaaccgtatccgcctacgctccaacttggtaccgcttgccggcaccgccacgatgaaggatctatatcacgaacgccgttgtgaattggcttttgagtttacagaccatctattcgacttaaagcgttggaaccgttcttccaatgccgacataaagacattggccgataaagagttgaacgcacatccacgtatccgcagatatgaagaccgggcgaatccggaatccgcgttcacgattattggttacgaagattacaccaacaaaaacgcctatcaagcacatatgatggtattcccgtatccaagtgaagagattactaaatcgaatggtcaactgaagcagaacgagggatattaaccggctcctttaaaccgatcaaggaacgaataagattcaattacgggctgtctcagaaaatgaaacagcccgtgttattttctaccgggtaaaaacgcatatctcaaataggtagtttacctttgccaattgtataatatagtaaacaaaagatacaccatgagattaattcaaactctttcttcttgcttgtgtacagggataatagccttattcacggcctgtagccaagcaccacaatcccccatcgattccgtgaatccgtttatcggcacgggatttcacggacacacgtatcccggggccacggctccttacggagcggtccaactcagtccggacacccggaaagggaattgggacgcttgttccggttatcattacagcgattctaccttaatgggtttttcccatacccatttaagcggtacgggatgtatcgaccttggcgatatcctattccgtccgtcactccagacacctctagcgttctcgcactcggacgagaaggcttccccgggttactactcggtgaatctcagggaggcaggtgtattagcggaacttaccacgaccccgcatgtcgggatacaccgatatacctataaaaaagggatagagtctacgttggtggtcgatatggaccatttattggataacgaatatatatacgaaggctgggttaagcaaaccggggagaatgagcttaccggtatgcggcgtacccggggctgggtagacaatcagtatgtcttctttgtagcgcaattctcgcaacccttctcttccatggaacagccttccgaacggcaagccgtacttaccttcgatacgactaccggaaagcccatcgtctgcaaagtcggggtatcgatcgtaaatgaggagaacgcccgtctgaaccttgagcaagagacggattcctatggctttgatttcgacgccatccatcaagcgacacgctccgattgggaaaaagaactggacgttatcacggtagaaggaggcaccgaagccgagcgcacgaatttctatacggcgctataccatagcaagatcatcccgaatatagcgagcgacgtgaacggacaataccgccgtcacgacatgagcgtagcgacgatcccggcaggtcgccgccaattctccaccttttccacttgggacaccttccgggcctggcatccgatgatgactctgttggatactaccttggtgaatgatatggtacagtctctcttggatatgtacgacgccagcggcgagcttccgttatggcccttatcggcaggcgagaccggaacgatgatcggttatcactccacatcgattatagcggacgcttatttaaaaggtattcgcggatatgatgcggaacacgctctcgaagcgatgaaggtctcagcagagaaaaataagaaaggagcggattattatataaaggaaggcttcatcccgacgaatatcaagaaagaatcggtttcctgcctattggaatttgcctacgatgactggtgtatcgcacaaatggcgaaagctttaggacatatggatgattatgagaccttcatcaagcgttcccagaattttatcaacgtattcgacggtagtacccggttcttccggggcaaacggcaggatgggaattgggagactccttccgatccattcgctatcggacgttcctatacggaggctacggcctggcaatatcgtttctttaccccgcatgacgtatatggattgacccagttgttcggaggccgggaggcattcatcgctgatctggatagcttatttatggttacctccgaggtagtcggcgatctggtagacgttacaggattggtcggtcaatacgcgcatggcaacgagcctagccaccacatggcttacctgtacagctacgtaggcgagccgtggaaaacccaagaatggacccgccgcctgttggacgagatgtaccaaccgactcccgaggggattatcggcaacgaggattgcgggcagatgtccgcttggtacctgttgagcagccttggtttctactccgtttgtccgggtagcaaccagtttatcctgactgcgccgctctttgacaaagcgaccgtgaaactcggaaacggaaagatacttacgatcacggcaaaccaaccggaaaagaataaatacatcacgagcgtatcgctgaatggaaaagagattaagcattgctatatcacatactaccagttgatgcaaggaggcacactggactttacgctctcggcgacaccggacaagagttggggaaccgctcccgagtacgctccctattcctatacggagcaacctaccgtctctatcccttacatagcgaatgatctggatttatttgaaggtgagattacggcggaactaaaatccacgacacccgaggcggttatccattacacgcttgacggatcggaaccggatgagaacgctccggtatacagcgagccattcgtcttaaaagagaccacgattatcaaggccaaaggatataaaaagggattcgtacccagccgtacgtactcgatccaagcgacaaaagccgtattacgccccgcgttatccatacagcctacgaagcatggggtagcttatacctattacgaaggagagttccaatgggtagccgatctgcaaaaagcgaaggtagtcgagaccggaacaatacctgagccttctatcctgaacgctaaattgccggatcatttcggttatatcttcaccggatatatatacgcaccggaagacggtgtctatgagttcagtacccgctcggatgacggtagcgtcctctatatcggcaaagaaaaggtagtggacaatgatgcctcccacgccgccatcgacgcgacgggacgcatccccttacaaaaaggctaccaccccttcgccttgcattatttcgaggattacgagggtgagtacctaggctggagctggcgtacgccaagcatgtccaaactagacgcgatcccaacagagaacctttatataaattgataatattaaatactgaatcatatgagaagaacaactctatccgtgctatccgccttagccatcctgctatccggcatgatcgttccagaggctgcggcacaaagtcgccgagacaaagaacaaacgtatgtattagagaaaccttacgaggtcaagaaactagtcccccctaccggaaagaaaataaagaacgtgatcctcatgatcggcgacggcatgagccttatgcacatgtattccgcttggaccgccaaccggggcaagctctggctggacaactcccaatacaccggcctctcgaaaacctattgcgccaaccgcctcatcaccgactccggagccggaggtaccgcactggccaccggccataaaacgaactaccatatggtaggcgtagatccggaaggcaagcccttggaatctttggctaccttggcgaataagaaaggcctgtcaagcggcatcgccgttacctgtcgcctatgggacgctacgcccgccgacttctgctgccacaatacggatcgcgacgccgaggccgagatcgtagcggattacgtgaactgtggcgtcgattacgtattcggcggcggctccaagctattcgagaaccgtgcggacggtcgcgatttgttcaaggaattaagggagaaaggttaccaaactccccgtagctgggaggaactggcgaagattcaaaaaggcaaggtattctgcgttaccgataccgtagacaccccgcttcccgccgagcgaggcgatctcttggctcgtgcctcgatgaaagcgatcgatctgctgggacaaaacccggaaggtttcttcctgatggtagagggctcccaattggatgattacggacatttcaacgatatcgacctgttgatgcaagagacacatgatttcgaccgtacgatcggacgtatcttcgaatgggccgcccaagacggtgagacattggtcgtcgtaaccgccgatcacgagaccggtggccttaccttggtggacggggatctgaacgagggccgtatcgtttgtaaattctccaccggagggcatagcggcgtaatggtccccgtttatgctttcggcccgggcgccgagaacttcacgggtatcttcgagaatacggatatcttctggaagatcaaaaagctcctgaatctataatcaaacagtattcatccgatggagagtataacagggctatcccgctagtcaagtaccgcagtactttggctgagaggacagcagtacttgactagcagtactacggtacccgaccgggaggactgtgttcaccgactgaggtgcgccttctccctctctcccccaataaatatcataaagaatgacaacaagacgaaacttcttaaagcaatcccttcttgcggcaggcgcggcctccgttcccgccgggaaccttttagcgcaagagaaaatggaagagaaacgccccaaatacaatcttccttacaagaacacctacctgaaggaacccttcgtgaccgagaacgagttccggacggcgaaaccggagaccatcacgcccggaaccttcgaggaggccaagcaaatcctcccggacccgacttggagcggacacgagaaggaaatcgagatgtactggaaggcttggcaaatcggcatcggcaacatcaaggccccggaaccggattccggtttcgtatgcagttacctcgatgtcgcctacaacggcaatatcttcatgtgggactccgccttcatgatgatgttcgcccgtttcggtacccgcttcttccccttccaacgtacgttagataatttctacgccaaacaacatccggacggtttcatctgccgggagatcaaggcggacggagcggactgtttcgagcgttacgatccgaccagcaccggaccgaatatcctcccttggagcgagatcgtctattataagcagttcggcgatatagaccgcctacacaagatattccccgccctttgcgcttattataaatggttgaagctaaaccatacgtggcgcaacggtacgtattggaccagcggctggggtaccggcatggacaacatgccccgggtggaaccgaaatacaatccgatatacagccacggccatatgatctggctggacgtttgcttgcaacaatacttcaccgccgggcatctgcttgagatgggtttctatctggagcgttggcaggagatcgaggagttcgaggacgagcagaagatgctaaagaagtatatcaacgagaacctatgggacgagaaggagcatttccttttcgatcaatacgccgacggaagcctttcctccaccaagggaatctacgcgtactgggccttattgaccgatgtcctgtccaaggaacgcatggatgctttcgtggccgagctggataacaaggagacattcaaccgcctgcaccgcgtcccttcccttgccgccaaccatcctaaatacaaggataacggccgctactggcagggtggcgtatggccgggagcgaactatatggtgattaccggcctattgcaacaaggctatcgtaaattggcttacgagatcgcacgcaaccattacgataacgtcctaaaggtgtataagaataccggtacgttctgggaatactacgctccggaacatgaggagccgggcttcatggctcgcccgaatttcgtgggctggggcggactggcaccgatctccggcttgatcgagcaaatcttcggcatccgctccaatgtgtacgagaagaaattgaccgtagacgtgaacttgacggaggcttatggtatcgaccgttatcctttcggcctcgacggtctggtagcgatcaaagtcaaggcccgttcttccgctacccaagagccgcaggtagaaattaccagcgacgtccccttggaactaaccgtcctttggggcgacaaacagaagacggctaacgtaaaacccggcacgcaaaccgtataaaacagtaaatccatcaaacatccagttgtagagacggggcacgccccgtctctacaactagactcaaaaaacaattagtatatgaaacagattctatccttatttatcacctccctcgccctctgtacggcttgctcctccccgaagggatcggacacagttcaagtggcggagacaaccacggagcagacgattcagaaagcctcctccgcaattcattacaacgccttctcgcacaatgattactggcgggagagacctctgctggacgccttgtccttccgcttcaactgcgtggaggccgatctgtggctgatcgatgacgagctatacgtttcccatgaccgcccggaacccaatccggcaattaccttcgagaacctatacctcaagccgctcgtgtcccgcatacaagcgaatggaggtaaggtctatcccggtagcgatcgtcctttctacctgatggtggattgcaaggcacaaggcgaagagatgtacaagctattaaagaaacagatggagaaccttacaaggaatatttctgttccgtcgataacggcgaatataaagaaggtgccgtcctcttcttcctttccggcgaccgtccgaagaacagcctgccgaaagagaacagccgcttcaccttcctcgacggacaaataaaggatctgggacagggcatccctgcttccctcgctccggtcataagcgataattactccgatttcttcacatggaaaggcgaaggtgagatgcccgccgaccaactacagaagatgcgtgagatcatccggaaagtccacgatgagggaaaactattccgttggtggggcgccccggataccgagcagttcaaacgcttcttcatcaaagaaggcgtagacttggtaggtgccgatgacctgaatgggttatacaacgtattgaacaagcgttaaacgagaaaattacaataggcattataaggttgttacaatgggcattctagcatctttacaacaggcatcgtaacagccttataatgcccatcatagttttaacatatcacaaccgcttttattccaaccaaggctgcggattcagcttcgtcttttccttccacaattggaaatggaggatcgtggaattaccgtcctccggatccgaatagatccttccgatcgcttgacgggtagagacccggtcgcccgcttttacatatacctgactcaaattgctataaaccgtcaagtagttaccatgacgaacgattacggaattattataccccggcaccacgaacacacgcgtcacctccccattgaataccgcacgggcatccgccccgggtgaggtctggatatcgataccactattactggtacgaacatatttcaactcctgatgctgttgctcgccgaatgtagcgacgatcgtatgtcttccggccaccggatacggcaaacgtccccggttattggcgaagttatcggacaattgcttctccgcctttgtcatcgcatagccccctttcgtatccgccacacgttcctcacggatcggctcttttttactttccggtacgggtttacccttagcggcagcttgttcacgagcacgacgctcacgttccgcacgttcacgggcggctttcgcctcggcctcggcacgggcgatctcctcggcgatctgcttctctatctgtcggtttaaagcctcggcttgacgacgcttcttttggagatccgccttcaaatccttttgtctcttattcaatagctggacttcctctttctgagaagcttcctcactttctagcttcttactctcttcttgacgagttcctaaaagggcacgtttctcggcacgggtcttctccatctcagcttgcttacggctgatctcggcctgcttttcaacgatgtcattcgcttgccgcttctgccaatccgcatattcccgcaaataccgcatacgccgcatggattgagagaaactctcggcggataggataaacaacaatttatcttgcgagctatggcgtttataaagccctcgcatcgatttaccgtaattcgtctgcttatcgcccagttcccgttttaaggtgcgcaactggccttggatattcaagatatctttctcgatctcatccagctcttgattcaataaactgatgactttcttacgggaaagaatttgtttggagagtagattcaaacggttcagggaagttttagcagtctgggccgtctcttgcaataatttattcgtctcctcgatatcggccaacgcctccttgcgctgctgctccaactgacggacagcggcggatttctgaccgtaaaccacggtagataaagacaatgccaatagaacgatccagacgtgcctcatgatagattattgattcagattcgtaatcgttttcaatacttgcgcaaaggtaatacgcttatatttagaaggaaccgaaaaatccaacttgagcggctcgtccagttggatacgggagtaatggatcttcaccccaccctcgggattcccgttcttcaacacctgcacatccatcaacatcgggaacggctgccgatccaccaagcgaaaatcctcgtacagccattgcaaggcataacgatcggaaggatccgctacataggtagagagaagtttctcctcgccatccgccttaaaggtatagaaaagccccatggcatccttggtcttgatctcggctaccgggccttcttgattcagcttaaaacgattataatgcttacgggaaacgccctgctcccccgggataaacagatgattcgtgaaaagagcctgcaaattgtagaagttgaactcgatcggagtctgcccttgcaaattggaataattctcgatcatatagcgtttattcatgcggtctaccaccttgatcgtatcccggctcaactcgatacggaagatctcgatcccgagaaaaggttgtaccgacagttggaaagcactatccttgaccatcttcatatccacccgagagctcatttgcttaccagggatatccagatccacgttcaaccgggccgtcaaggtacggaactggaaggattgatcctccaccgactggaagaactcattatgagccttcacgctagcggattccaccgtcccgactttcttggacgatttacagcctgtcaacatcgaaagtaaaagacctccacataacaggaaggtcaagaaatagtctcttttcatttcgcgttctcgtcttctatatattgttgctcggcgatcttacggttcaagatctcggaatccttccccatctctttcgcctttttccattgctccaccgctttttccttatcaccgttcatgaaaaggatgtccccataatgatccacgagttcggcgctctttgtcttatctttctccaaagcgctctcgatatagattttcgccaaggtatagtttccttgtacgaagaagatccaagcgtaggtatccagatacgtggcgttgtccggttccagcttgatacattgggcgctcatacgttccgcctttttcaagtctttcttctccaaagaaaggaagtaactgtagttgttcagtacgaccacgttcttgtcattatacttcaacgcctcatcgtacgctttatacgcttgatccaattgccccatctggtaataaatatcaccgatctgaccgtagaaatccgatttcagcggcaggttctccttcggaatgatattcaagcccgcataataggtattcaaggcttcttgatatttctgttgttggtagtaagcgatacccagatagaagtaatattccggcgactcggggaaaagctccatacaagccgtacagatacggatgacctccgggatatcctcccctttcaaagccagattcagcaattgctgccaagccccggcgttacccggttccatctctgttaccaactggaactggaatttcgcctcctctgtctttccttgggccatcaagagaccgccatacatcagttttaagtcgatatcctccggatgttgctccaaaagagtttggaataaatggttcgcattctcagttccttgcttcgtttgttgcagtttcaagatataccgggaaaggatgttcactttcgtctccacgtccagcttctcgtttaccaaagcgctgcggatttgttgctcggcggcctccttatcccctttcgcctcgtagtaattggccatagagacgatataataagggtcggtcgaatcaatctcattcgctttttgatagcaagccaaagccttgtccatctccccgttttccaaatgaagatcgcccaatacgatctggtaacgggcctccataggatatttagccgctagcttctcgatctccttgaaagcctcttccggtttctccaactggacgtacagtttgtatttctgcatggagatcgcctcgttcatacccataaccgactccaacgcatcataagcctcgatcgccttcccgatctcgccggcttgcgtcaaggcatcggccagataataattcagctcctccttctccggataatcacgaaccaattcctcgtactcctcggcggcttcgccatacatgcccagattccgggtgatagacgccaatgccattttatacgtgaaattatccttgctgttggccacggctcttttcaacatctcgaccgctttctccggacggttcaactgtacataaaaagaagaaagctcatacaagaccggagccgccgtagagtcaatctccaagcaatggttgaaggcatcataagcggcgtcgaatttcccggcgttcttcaagttcaagccctcataaaagaagtaatcgaacttacgttgatccttctccgtttctgtagcaccagccgggagcacagcgaccaacgagaggaaagagatgagatatatcagttgcttaaacatcctattattcttgttaaccttattattcttattcttttccggtatgaccgaatcccccggctccccgctccgtatcatccaacgtctccacgggttcccaatccacatggctatgagcggctataaccatttggcagatacgctcaccatcattcaccgtaaaaggctcggaagatagattcacgagaatgataccgatctccccccgataatcggcgtcgatcgtacccggcgtattcagcagggttatcccatgctttaaagccagcccgctacgcggacgcatctgggcctcatagccttccggcagcgagatataaagtccggtcgggattaatttacgttccaacggtttcaacacaaccgattccgacaaattcgcccggatatccatcccggcagataaaggagtcgcataacccggcagcgggtgatgcgatttattgataattcttactttcatacttgcaaagataaacaaattgtcaatagtcaatcaattaacccaatccccgttctcttttattaactgaactaaacgttctacagcgtcttcctcggggatattcttgaggacacattccttacctttatacaggctgatttgtccacgtccggcacccacataaccatagtcggcatcggccatctcgccgggaccattcacgatacagcccatgataccgatcttcaagccttttaaatgggaagtagcctccttgatacgggcgatcgttgtttgcaggtcgtacaaggtacgtccgcaactcggacaagagatatattccgtcttactgatacgggttcttgtagcctgcaagatcccgaacatacagcgatccgagacaaccgcctcgcatccctcattgtgcagcatcaagccatccccgaaaccatccagcaaaagcgttccgaaatcggcggcggatttcagttgcaacaactccacatccgtctcccggaaatcacgatgcaagacaaccggcacgtcacaacccgccatcagcaatttatgcatagccgcacgttgcgagccaaccccattccgatgatgtgtacttaataagaccaccacggtcttatccgctttcaagatctccaacatacgatccgtaagatccatatacgtcagacggataaacttaagcggacaatcgtaatcctttaactcctccgcctccgaggcgatgaagcaaggaaaagcattcggacgctctttccaaaaatgagcgtctaccaataaacggaaattatccggcaaattatccggatcttcctttcctatatatatatagtccggcaaggacaaataatcaaactcaaaatccccgctactacgatcggagatcacgactggcgagaaagtacctccgataccttccaccacacggcttatacgacggcttgtcgccaccgtatcgaaaccgggagccatcgaagcctcgataggacgatgattttcccgttccctaatataatccaccaatttacgcgctaccggcatttccgcctcggggtcctcactcaaggaaacccggatcgtatcaccgataccgtcacatagaagcgtaccgattccaacagcgctcttgatacgcccgtcctcaccgtcacccgcctccgttaccccaaggtgcaaggggtaatgcatattctcggcctccatcgtacgaaccaacaaccgcacggtccttaccatgacaacggtattggaagccttaatcgaaataaccacatccgggaaattctcctcccggcaaatgcgaagaaactccatacaactcgctaccatcccctcgggcgtatcaccataacggctcatgatacgatcggagagcgagccatgattcacaccgatacgaatagcggtgccatgtgccttacaaatattcaagaaagggacgaaccgctcgcggatcttctcgatctcggcggcatattcctcatccgtatattcaagatggctgaatgtctttaccttatctacatagtttcccggattgatacgtaccttttccacctcaccggcggcggcatcagccgctctaggattaaaatggatatcagcgaccaaaggagtcgtatacccttgctcattcaattgtttacgaatctcgcccaagtttcgggcttcccgttccccctgtgccgtaaaacgcacatactcagctcccgcctcgatcatacggatcgcttgagctaccgccgcctccgtatccatcgttgatacattagccatggattgaatacggataggattctcacctcccatgggtgtgtcaccgatttgggcaacggatgatttacggcggttgtaattaaagtaagccattgttcattgaaaattgagaattgaaaattgagaatgagtgttgagaactgaaaacctaaagagagactttctccttaattttcaattctcaactttcaactttcaattaattagttttgtatttaaaagaaaccttagccaactcctcgttagccttcacgattttcttcttcaaatcctccttataagcggatagcttctcctgaagttgctcgtcgtcgacggcaagcatctgcaccgcaaggataccagcgttcaaagcgccattgatgccgacagtagccacagggattcccggaggcatctgtacgatagccaacaaggcatccataccgtccagcgtagagttaataggcacgccgatcacgggaaccgtcgtcatggaagcgatcacaccgcaaagatgagcggccattccggcagcggcgatgataaccttgattccacgtcctttagctcctttggcgaaagcctccacctcagcgggagtacggtgtgcggatagagcatgcatctcgaacgggatctccatctcatccaagaacttagccgccttctccataacgggtagatccgaggtactacccatgataatacttacaacaggtgtcattcttatttagcgattaatttttgatagtcttcagcggataatagttcctccaactcagaagcgtccgtaagagaaatcttgattaaccaacctttaccataagcgtcttcattaaccaattcaggagcgtcttccaattcagcgtttacttccaaaacctctccgctaaccggcatgaaaagatcggaaacagtcttaacagcttcaatcgtaccgaacacctcttctttagcgacggtctccccctctgtcgtaatgtctacataaacgatctcacctagctcgccttgagcgtaatcagtaataccaacataagctacgtcaccttctacacgaatccactcatggtcttttgtgtactttaaatctgcaggaaaattcataattttagtgtttttattagatgaataaatagatataactcattaatgaggctacaaaggtacatataaatcccagacaaaaccccgcatatacctgcattggtgtatgtctttttaaaaagatgcgcgaggtacctaataaaccggccacgatcaacacgactataaaagcccagtagggatttatcatatggatacgcgccactcccataatagcgcccagtaacccgccgataccaatggcatgcgcgctaatcttccaagcgaaattgacgcataaggcgattaccaaggctacgcaagccccgatcagcatcgccaacaaccaaaacggcatcagcatcttatacaggaaaaagatacagaccaagatggaagtgataaaaatcagataaggaaccactcgttccttccggtcggaaagctctatatcgccggccgcgccatttttcaccaataagaaaatgaaaagtccgggaactatcgctgtcgaaataaaggtgcctccggcaatcagcagcttcacaggtaacgggtaaatggcgaggaatgtaaacatcaacgccaacacgatcccataggtcaccataagcaacggatggaacacgaaggatattatattcgagaatagcttcatacgcttttatatttcttttctcagacgagctaccggaatccccagttgctccctgtatttcgctaccgtacgccgggcgatgacatatcctttttctttcaggatcgtagccaactcctcatcggtcaacggttttcgtttgtcttcggcatctacatgctctttcataatctttttcacctcacgggtcgagatctcctcgccggtatcggtctgcatagactcggagaaaaagtatttcaacggataaataccgaaattcgtttgcacatatttactgttacttacccgggaaatagtggagatatcatatcccgcacgctccgctacgtctttcaagatcatgggatggagggtagcctcatcgcctgtcaggaaaaagtcccgttgtaaatagataatcgcctccatggtacgctgcaaggtctcattacgttgcttgatagcgtcgatgaaccactgggcggaatccaacttttgtttcacgaactgtacggcatcccgcctctcagcggtttggttcgccttattcgccgtataatcctgaaacatctcggcatactcccggttgatacgcatatccggtaccccccggttattcatgctcaagataagctctccattatgcgcttccaccacgaaatccgggatgatctggctcatcgccacttccatagaaccaccccaactacttccgggtttcggatttaacatagtaatctcgtgaatgaccttctttaacgtttcctcatcgatatcgagacctcgtaagatcttatcgtaatgtttgcgggtgaactcctcgaaatattcggtcaaaacacgaatcgccaaatttgtaaccggagtattctccttcttatccagctggatcaacagacattctttcaagtcacgggcacctaccccggcaggctcaaaatcttggatgatattcaagatagactcgatctccttctcatctacctcttgtccggcttggaagatcaaatcgtctgctatcgccgaaaggtcccgtctcaaataaccgtcatcatcgatatttccaatgatatactccgctattttcatttgcttatccggtaaatcccttaacccgagctgctgtaacagaaactcattcaaggattggcttacggagaaggggacatcctctttccgttccgcacgctcggtcatttcccgtagcttataatcaggtatatcgtcttccgttaaataatctcccaaagaaaggtcggtctcagtatcaacagaagggatctcttctcccccctcctcgctttcagttcgttcaaaatcatcaacaggctcttttccttcctccaaggctgggttatcttccagctcatgcttcacacgttcttccaactcgatcgcaggaagctccagaagccgtatcaactgtatctgctgaggggatagcttttgctgtaacttttgttgtaactgttgctttaacataatctaaatcattgcactgtaagggcaggacaatcacccgccctcttatttatcaacatgcaaatataagtttttagttttaacagtacagctattaaactataatagttctaaacaaggtgcatgatggaccctagcgactttaaaatccttccttcacgatccgtttgatcgggaggaagaatcgttcgatcagacgtaattcttccgttacgatctctgcggaggcttgcgtctcgggcgagacgggcaggtcatgaaagcctcgatgcggtcatggtctccgatgcgctgcatgatatcgcccaccatcttggtatcgaagaaatgcaggggcaggcgcatcagcttggcgaggaaatcggagatcaaggcgatattgatcctcgtgtttacgtgcagcaatatccagctccgtatgaagtccacggatagcttggcgataaagatcaccaattgcgatataaggatcaaggttatgaaacctaggttgttgtcccgtataccggtatccaccaagccctgcgtgaggaaaggcaggatgagttgcagtacgctggctgtcaccatgcccagcacaagctgtgccatctcccgcctgtagggcgatatatatcggaaaaagaatccgaggttacgtttcctgtctctcccctcgtcctccatcccgtagaactccggtcccggttccagcaagagcgccgtcccggtatcctgtccgcccactttggtgctgacccagcaccgcttgaactcctccctcgtataggtgatgagtcccgctgccgggtccgctatgtagaacttccctttccttatcttatagcaaaccacgaaatgccattggttccaatgtagtatgcagggtaggggacattccttctctagctcgtcgatggtgatcctcacgcctgacgttcggaacccgatcgtctccgccgcctcgctgataccgagcatggagactccttcccctgtgatgaaggctttctcccgcaggttctggatggagtaggtacatccgtaatgcttagcgatcatacggaggcaggtagagctacagtccatactatctagttgttggaaatgaggaaacatttatggacttgattaaaaaacaataactatttaaaattcataaacataatcactggattggaatcctctttcatcttttttacaatgtcaataagtttttgtgacttgatttttccttctttataagatttaagtaagtcttccgtatttaatatggcgattcctattcgcatatccacagttcgctctatagttcttggatctaactccacattattatcctctatgtccttatttcggatttttggtatatatatcttttctccttctttctctatcataaaataggcttgtgcaaagccctcatcagtactaggatcgtattttttttctaccgtggaaagaaaataatattgattgctctcaacccaagcattgacgaatatcgggatggactgctcatggatagaaggtagccttgtgaaaattggttttatctcctttttctcattgagaatgtaaaatgtatcagcggaaatttgcgagagtaaaaatccttcacggacctttactaaattatagaaataagggctatatttaaatatcatcccattttctttcactgagatgtaaggttcaatattctcttttaacctaagatctattgaatcttttatcttaccagtctctttagacacgaatatatatgccgaggagagagactggttattatcgcacaatagatactccttgttatagttttttacatcccaaagaaaatactgagtatcaatagaattggatttaataaattgtccatccatcgtataatacagaatcttattatcgtgacaaacgattaattgatttacgaaggaatcgtaaactacacttccgatgtatggatattcgccaggaccttgtcctgcatgacaaaactttttcacaaaatgaccttgcatatcataaaaaacgaattcttgatccgaattggaaaatataatgtaaaagtctgttaccaccttaggcctaccggaaacaactatagaatcatcaattaaaacataacttacatcacatatatcttgtatatagatttctttttccgggtaatgctttctcatatcaaatacaataactcctttttggttatttgaggagcaagaacatgccaataaaaccaatagaatataatagtaattcataattattgtcatttaaggttgaatattgcagaaaatataatcttttaatattaattccgaagaactgataggaggacataagtatttatatatgcaattgcaacaaggctccttcttgtttcgtgttagaaaccataaattatcagtgttatttataattcgagatacaatagaaagtaaaggttcctttaatatatttcctataatgggttcagttgtatttaatcgaacagtaccatctaaatacacgcataactttccataaaaaattgagttaatagatgcattttgatggatatgtcgcatgtttacaggatctgattgaatatcttttatgctaaatgacgcttgattttgaaagaatttaatatttttttattgtaaaataaagtaatatcaaacatgttgataaatttgttttttgttaaatattttaggtctttttcatcttgaacaatccagttgaatgaattcttatttttcataataattttcatatttactaagttgtaatctgttattagtacttctatattatgaccaaaattagaaataaaagcatctggtaaataaatataatttttgtaattgacaattatatgacatttttcttttatgtgatttggcatagaatttaaatagttgaaagtaaaatgatcattaggattagatattataatatttattttatataaataatcaatgcatgaagatacgctattaataaagcttttgatgttcaatgaatcaggacttgtgattatgctatcttttgtacaagcatcaaattgcttgtgatattctctgcaatcacggcagtcatttgtacaacttgtattcgtgaaaaaagttatctctgttaatgatgataatatattcttcgcaaaatggttaaagtttggatttgaaatgtcaactctaagatgtggcattaactgtacaggttttgtagacatttttttgattggaactacatctcccataaataaatttctaagatcatctacaaaagaagagattttatcatttgcggtgaacttaatagggataactccaagattatctaatatatttaattcttttattaagttgattatgtctttatcataaaaatgcaatatagccccatccaatgtattgtataataatgcttcttcttccaaaattgatatatatacataaggttctaaaaaaagccaataatccatttccatatttatataattttatatttattaataatatctctatagctgtatatcccagattcggctatttctatgttttcagtcactttgttaatccattctttctttgacataaatccattacaatttaaatgatcatttgaatcaaatatataaaatatgcattctgtacactctttgttattataacatttatcacaatatgactggaggcgtctataagaattattgtaaagggatacaatatacttattatcaataataacatcatctggtgtgcaaattccaaaactataattttgtcctatgcgttcacagggtaggatttttccattaactgttacaaaaatctttctgctgaaaggttgacaagtccctgttgaaaattttttagtttttaatgaaaagaaaagatctctgctgtcttgataaaaactattagaaaatcttcgtataaattgagcaaaagaaactgctcctggagcaaatatctccatgcatgatcttattttgtcaaaatcaaagtcgcttacaccatcttttatatttgcatatattgaataaaattcattttttagatcatcattgacaccaagaggatttattgtggatactcttggtgtttttctgtatttatttttgataaaattatatgagtttacaatggagttgtttttacttattacagaattgaaatttacgtgattttcaaaataatcagaatatttagtgtataataaatctatatttttgagtacttgattaaatgaagggttaccctgtttgtctattcgtaaggcagatccataggaatccccatctagactaatcaataaatcaaatttcttctcatgcaaataatccatatacttatctaataataagccatttgtagtcatactataggtgaattttctagagggattatcgagattttcagtaaacgatacaattgttttaataaaattcatatttaatagtggttctcctccataaaatcctatattgacaactccatctgaatgattataattagagttccataatttattcatgtatttcaacatagaataagccaatctaatatccatttttttattgcttcttatgtcgtaattattataaaatttaccatatgcgcaatatacacaatttaggttgcatacatcagttacctcaaatgttatctggcgagtatttgctagagatataatgacatcttcttcttttattttatatttaaattcaagattatcctttggatttaaaatccccattttatgtaaatatgcaatttttttcgtgtaataagaagaggtatcaaattcggtattatcagaaatgtatttgactccatggcttggtgttattgataaataattagagtaattatccactatataattattgccatgctttgttttaatgtaattgacagattgtaccataagctgtttttgttttatcattttcaggttctataaacagaacctgaaaatgactaagatttaggatttactaacttttattgttgctactggcagaagaatttgtgttgtcagaacctcctgaactagcacatccgcaaccacatttgtaacctccagagatgattttcatctctttttctttaagttttttactactggatttaaccagatttaacttgacacttttcataaaacctccttttttatttaataattaaacttatcaaataaattacatatactatgctccattcgagatagtgtatatttatttgaataagatgttctactttttattgaaaaacggtttctgacgcttttatcagaaagatataaaattgctttttttacattttctggcttgatgaagcatgtatcgtctttttttataacaggaatagacactccttgtgccatttcctttaaccctgtagatgttgaatatattaatggaactccatgcatcataaattcaatagcaacatagctgcattgttcatgaaatgatagcataattccaatgtcacagatttgatataatttataaagtttatctttttctaaaaaacctaagaaagatatatttgttctcatatttgttaattttagatatttattatagtctccattccctgcaattaatagatgatatttattagtgttttctaatttgcaaaaagcttctaggagaatatctacaccttttatttcatctagtctccctacaaatagaatcagcattttattccttttaatccctatcttattcctatacactattttatcatacttgcacatcttcttaatattgggagataatccattatatattaaaactatcttctttttttctatattgtataatttatgtaatatattttttgtatactcacataagcatattattttatctacattctcatacacgtatttttccattaaaaaagagtctaatagatctttgtctagtttatttttaacgcattggctattttttattatactttcatagtaatctaaatttccttttaaaagaaaacaccaattctgataatgtattgtaaatatcacatacgaattctttagcctctctttgattttttttataatgtatatatctttataatagttgaaaataaaaatagattttttctgtttgcaaatctctacatatgaaaccaatatataccatatatttctataatatgctttttctgtatttttattaaagcgataaaaactgtcaggaatataatattcaattacatttttgtcactatattttacgcagcattctgaatagttagaactaacatgtataatatttagtatatacttgtcgtttttaataaatatacttttaatactttgtatataagtaccaattccatatgcttccgcttgatagctttctgaaaaaatatatacatgagttttcataatactattgtatttctgttaaacatttcattccaactcctgcgcaaccatttattaaacacaaatttaaagataggatattattatctttgggctgttttgataataaataattccatatttcttgctcattccatatttttagtttatttgttatttttctccattctgaaagataatatgtatcaaatgattcttctatcgctttatgtgatatagataataaccgtaatgatatataacatgatattcccattagtcctgtctccaaactaagatctttcattcttcgtaaatcccgctccatgactttttgatcgattcctgcaaggatttcattggaatccccttccatgaacccattttgaatcagatattcgataccccagccaattccacacaatccagtttctaggtttattggtaatgtttctggaatattctcactaatttcctcaagcaactctcctgcaaagtcatcatatatggcttgatctgtatatcttgcgtagtgtgcaaagaacaatacaacccccattttcccatggaataaaccaatatcctctatgtcgattgaatgcaaaatcagatgattcgctattcttcgtaataatatgtctttttctgtattcatcttaccaacactcaattttagtatttgaatcttttgcaaagcctagtaataattctttttgataagttttgcttgatgccaaacaaacaaccttacttgggcttaagattcgtaaaatcgtctcaaacgtatttgcgtataagaacagtctaggaaaattttgttcgatactatcattctcaaatactttttgttcggaaaattcaacttgtacagctgtaactatctctgatagttctgtgtcatccggaatctcatattcagataataatagaattggaatctcttttccttgtaaaaaagttgatacatgagccaattctttctcatctgttaggtaaaccaaacaacatcttttatatggagataaaagctttgtccaaggatggctatctatattaaagttatttgtggtattccttttcttttctatccactcaaaatgattcaagaaattagagatattgtgaatagactcctcgatggattttccagcgatacgagaacgtacataatccatttgttctttcgaaatgaaagacagtatatatatgaacaatgcgttttttatggaatggttgccaagcatgagtcttagagcatcccggacttcatattcttggatagcttttcctatatattcttgtatgattgtatcaaactcgattttgtattttcctaaatctagcaaactcatcttttcttgaaactctccttgtctccaattccccaatgtgcgccaaggaatcgaatggcgttgcgcagaatagaaataagaaaacatagattcaaagcgtgaatgtatgaataagtttttcgtttttttcaactttgaataattgcatttcttgaaattctctaagggcataaagcgatccttcgccttctcataccaatattgataagtttcggtatgtttttgaagacaagggcgtaaatgaaaccatatcagaccgccatcgaacaactttttattgtgaaacattacttccagaacttgattgtagccgggagcttttggcaaataacaagcttggtaggtcatttcttcagagacctcaaaaaagaaaagatctcgcactccgttgaatgggcatagaatgtcccggtaggttgtgtctatcttttcgtctcctaaaaaagtaagccattctccatttttttgtaatacattgataccagagagggataccaatattttatcttgtttgattctttttttcaaataggagaaatagaaaggagccatctttatcgctaaccagtcttgccattttctttttggacttttgccctttttagaattatgcaggtaagatgtatatagcttataagctagttgttccaaagggttgatccggactttttgctcggtgcggtaggcatcacaatattttttgaatgattcggaaaaaaatagctggtctgaatctatcttgatcgcatagcgatatgttacttttgaaatcgcgtaattcgtgtatccggaaaggagatgaatcgaatccttcggcagattcatggtctcttgaaattgttcatccgctaaatctataggatagatatagggtagatattcaaagattttgatcttgttagggtatttgctctcttttcttttaagtatattagctgtctcatctgtacaattgtgatataccgcaatcagctcatctaatccttcaatacaagactctacgcaagcgtctaggaaatccgcgctgttttggcagcgcaatatacccgttacccctaaagggcgttcttttgtcaattgtgataaatcgacagcgtattcggtatagtcctgttgcttagagttcatggtaattaaattattgattcatttctaattgattttgagaaaaacaagttttcctgattattttctgtatatagctctctttataaggactatatggcaaatctctttgtacatcttctcctatgtactcttttctaaacattaaatatgtatgataatcttttagtgtatcgtcattcaaaatttctgtttcttgtatctttatatctatatccgataatacatctttgatctcaccggtaataaaacgttctcttaatagataggtgattccccatccaatggccacataatccatttgacaaatcaagagataaattatccggaagctccattatagattctaatatctcgtccgcgaattgttcatataaagcatctccactataacgactgtattcataaaatagaatagtcatgcctagcttaccgttatactctagagcctctgttttcagtaccccgtaacggagtaggtcttttagtatgcctttgtattgaatgaataactctttcatatcgttcattaattgtaaaatgaaaaattcgtatcccagctaccaaaaaaataatgagaacaatatgcttcctttattttttcatggaatgagacggtctctccctgatagatatatgaacccatgtcatctttcgtcacaggcgttacttttgaataagggaaaagagtaaccttgtatcttttcttcaaggtattaaatatccgtgatatcatcaatgggcctgttgtatgcatcaccttttgtactggatagtcccgtaacattgcatcagtaatttcttttaaaatgtttatccatcctccgcatcttggctcagaaaccataaatgcgtttcctattagggtggatacacttgggtagaaattatgctccgggggctcttcgccaaatcctatcatcacgtcttttaataatggttcgattggcttgaagcattccgtatccaaatccgtatagactcccccatatacatataatatcatatagcgaatcgtgtcccaacgttgtacattgtatgggaaacttctatacatggaaagatactccggaaaatgtttttttaccaactcatccatttcctctccgttccaaaggtgatattcccaatctggattctgctctcgccaagttcttgccaagatttgtaagcgggtgggcatacatggttctgtacgcccctcccagacttgatgtatgattttagggattgccatacggtttattgattttcaaattcacccactagccatcctaacttatgggtcaggataacttgatatgtccctgttcgcatcctgttcactgcaatgtcgattatatcgcccatcgcaccggaaaatgtattctcatatattatattactattctcatccgtaatatgaattgtcaggttatccagagcatccttgaactctatgctcagtatattgttatctatggacaatgtgggtggcaacgccgtgatggagcgataatcctcgtcatcccatcttccttgtgtaggaatgtcatccccatacgccaatgaaatggagaaaaaagaacttaaaaagatacagaaggtcaacaaatttgttttcatacgctaatattgtttaattactggttgtgttttaatcgtttgtgaatatcagtaaaaaaacaataagcgaatgaacaaatatgaacaatgcgcaaaaatgttttttcgtcctgttctcacttttgtccgtttttgttcgttttttgattttaaatcctgtataaatatttatatatcagatatatatttatcaaaatccttcgctgttcctgccttcttattgagcttctcatacaatctttttcgataaacggatacgtttcccttacccagcaagatttcgatcgccccgggttttactcctattttacttagataacagattttcctctccgattcgtttaaggaggtggatttttgcaaggtggtcaccatctttgggtaaagtttgtccaccgagatgaaaagtttatgccaatccgtatccgtgggttcccagccagcgggggaacggaatttatcatataggcgttcgttttgcagtcgctctgattcctctatttttttccgctcttcttctcttgcttgttcccgtttctttaagtttgagttctcactccgaagggtgagcaaatttttctctaattcatctttggtatgagacaatttctctaattgcatgattttttgcctaatctcctcgtttgtccgctttagttgctcatctttttccttggaaagttgtcgctctttcgttttgtaaatttggatttcgttctgtaggctatcctttacgtcagatatatttttcagggtctgctcatttctttgaatttgttcctcattggcttttaaccgttgtaacaggctttttcgttctcgcctgtaatggatgaaacgcagtagggctactgttaataaaaacaggcaagccgttatgagtaaagaataaaaggacttctgtttagaggcgtaaagccgtgcctcccataaatcctgttcgatttcgttatatgaatagaacgcttgtacgttccggatggattcagcattctttccttgctctatagaatcttttaataattcgtattgcttagataataacgccgcttgttcccattgccctttctccaaggctatttctttcaaatggaaaagtcctccggcacgtgtctcgggtaaaggtgcagaatttatacaggcttgtaagtaaaagcgagccgagtcgatttgaccgcttttcttataaagttccccaagcactagatatacgggatatttggcttgtggttttgctacgttttgtaaagatgtccgcaataatccatgtgcttcctccaggcgttgtctgtctatatagagacctgctaattccgtataaaccgaaggaataattctcttcctcattaaagcgatcgctttttggttgcaaataatggagctgtcttgaaggcccagcatcaagaaggtacgccctaagtcccgcaatgcgaacacctgtcctgtactgtcatttattagatgaaaattctccaccgcttttttctggaaaggcaatgccttctcataaaccttctggtaggcatagagcatacctatatgattatggatcctaccaagcaaggcatgatcctctatcttttcctcatcccgaagagctttgaggtaatattcctgcgcttttagcgggtgccccaagtcttgattgattcttcctttataataccaagctttcgcttttcttcccaagtcgtctgttttctcgtaataatccgcggcgatcgagatcagggagtcggtggtatgcgtaacgtacgtcttgtcttccgcttccgtcagcagcaaagaataatgtgccttatcttttcgggataggttttctttgttctctatttgttcaaggagcattagcgcgctatccggatgttggggcataaggttctctactttccggaagtctatggttgggtgccccatcccatcgcaagagatccatataataggtattagaattaacaggaaaacaatgtttttcttcatttgtgtgttatttgttgagggtaaaaataatacaaaaagacgagaatatcttggctggaaatcccgactttttggatctatttttattaccattaaaacatattgaataacagacggttacactagaagcaagtcatccgtttatggcttgacaagtgaataactaacggcttctcaagtgaataactaacgagtaggggtagccgtcagttaacggcttgggaagtgatcagttattcacttgagaagccttttcccagagaagatatacttactttgccgatgaagtatatcttctccgggcataggatatatacttcatccgcaaagtaagtatatatggataaaacaggcttttttatcctaccagccatcgttctatattccgggtctctgaggagaagttcgcgccgatcttgatcacttgccgtttatcagcggcgaagggtagggcgtagcctttctcgtcgatctgccgcagagcctcctctgcggttccgttcagcttgaactccatgatatagacgtagcggtcggtttgtaggacgaggtcgatgcgtccgttcgaggtgtggtattccacttgcgtgtacagtccgaccagcttgaagacgatgaagaggacgtttcggtaatgcagctccgtgtcccgttccgggttccggccaataatcgcctcgtaagaggtatcggcgaagaagctttgtaggcggtggaagaaggcgtcgtagtctcctgcccgtacctctctcacaaagcggcctatctcgaaaggagacttcgaggcttgaatgttcgtatagaacggcagtaagtatttcatgaaaccctcctctacctcttggttcgggaaacctaagcgatagatcttgaattccggctcgtaatccttgatcgtgaggtatccgctttggtagatgacggggatgggattgttcgaagcggagtcgatgctgttcaacacatccgcgtcggtctcggtgttggccatgtcgtacaggtcgtagttcgttcgtttcagcaactccaccaagtaagtgggcgtgcccgtctcgaaccaataatcgctgagccacatatacttgaaggtattcagcaggctgaaagggttataaatgcccggtcccccggccacgaaatgatagccgtcgtaccgtttccgtagcaaggatcgggcctcctcgtatgtccgctcaagggcagaggccaacgtatggatgtcctcatcgaaatgcgtacgcagctccgtttccgtgatgccgcaaatggcggcgtaaggctcccgcatggatatatcgtccagattgttgaggtcgctgaagacgcttaccttcccgaacttggtcacgccggtcagcagggcgaagcgtatggccctgtccatggtcttcaacacgccgtagaagggtttgagcatgttccggaatcggttttgcgtctcctcgtcgtgcaagttctgtagcaagggcttgtcgtactcgtcgatcaggatcacggcccgctgtccggttttgcggtaggcccggtcgatgattccggcgaagcggaggggcagggtctcctcggtaggccgtgtcccatactcctcctcatatctggacaaggtatcatttaatatcttatacaagctgtcaggggcgtcgtagtgggagatattcaagtcgaaatgcaagatcggatgcttggtccactctttctccagcttctccatagccagtccctcgaacagctcctttttcccttggaaataggcctccagcgtggatagcagcagactcttcccgaatcgacgcgggcggctgaggaaatagtagcttcctgttttcaccaattgatagatcaaggcggtcttatcaatgtagagatagccgtccttgcggatcttctcgaagttctgtatgccgatggggtaaatagtctggttcatatcgtcttgtgtttaatgtgactcatagacaaagatatgaaaaaaacacgtacatgttttcaaaaaaagacgtacatgttttcggaaaaacacgtacgtctttttttaaaggctttatagagtatgattctacctagtacttgaagcttcctccccccaagaattcacggagcaaggaagttccgggaagttcctccgtcgggatgtaattaaagtagcggaggaaacggagcaaacgatacgcctccgcattcgccttactactctccggcacttgcgcgaggatcggttccgcaaatttgcgcaaggcggccagctcatacaacatggcgctgttaaacatagcgtccgcattctcctgatacggaaagatccatttatcctcaccccggcgaacgctcggccaacggttgatcgtatcttccgccgaatatcccctaaagcgataatcccggatgatacggcgcagcagacgattatccgtcgtcggtatccaattatggttatccaaagagatagaggtcaagaccgagacatatacccgatatttatatttatcatcgataaactccgtcagctccggattcaaggcatggataccttctatcaccaagatcgagttctcacgaagcttaagcttcttccctttgaaaacccgttggccggtctcgaaattaaaagtcggcaaatcgatctcttccccggataacaacttcttcaaatccttattaaaatagggtaaatccagcgcatacaaggattcaaaatcatactcgccatgctcatccttcggtgtatcttcccggttcaagaaataatcatccaaggaaattcctaccggatgaagcaggttagttgttaattgcacttgcaaacgcttgcaaaacgtagtctttcccgaagaagaagggccagagatcaagacgatacggatgccctctttatatccatcggcgatcttttcggcgatcttagcaacctgtttttcctgcatcgcctcagagacaaggattatatcctgagagcggcctttctctatcgctaaattcaaatcccccacattatctaagccgacagtccgctgcaatgtaaggtgttccttataagcctcgaacatcttatcctgcttgatgacaggctgcaattccatcggatcggtctgcttcggaatacggagcaaaacgccatccatatacggttccaagtcaaacaattggatatagccggtcgaaggggttaaacagccataaaagaagttgatataaccttccaactcataataagaggtataaggcaatcccgccgtctctattaagcgagccttatcattcataccccgctccctgaacaatacggcggcatccaccgtacggacactcttatggaggaaaggaagatccgcatcaatcaactcccacatacgtttcttgatcctctcgatcgtctccagatcgatgttcttgccgttatggatcacgcaatagtaacctttcgacaccggatgttccagatttaaggtcgccgtcggccaaatatcatacaccgccttggaaaatatatggcaaagcgagcggacataggttctcaatccggataattgagtatagtcgataaattcgatatccttcggttgccagcaacggaagttcaagctttccgtcttattattcacttgcgcgttcatcggcctgtaccgaagcggagcgccaagcgccgtataaatgtccaacaacgaagaaccaatgggtacatccttgtaggtattattatttttgcagtaaattgttattgtctcagacatactatctcagttattatttgtaaattcgccccctaaagttaggaatattaatcggatatacaatccacttaaacgtaatttaaatggactattctttttttgattttctccggctgatcggctccttggcgctgttcttgtacggaatgaagatcatgagtgaagggttacaaaaatttgcgggtgacagtttacgtcgaatactaaccgcgatgaccacaaacagagtgaccggtgtgctcaccggcgtgttaataacggctctcatccaatcctcatcggctacgacggttatggtcgtgagtttcgtgaatgccggactcttgacattgacccaatccatcggagtcattatgggtgccaacatcggaaccacggtaacggcatggcttatctccgccctcggtttcaaggtcgatatcgccgcattcgcccttccccttttagctttcgctctcccactcttcttctcaggaaaaagctctcgtaaatcaattggtgaatttgtctttggtttcgcgttcctgttcatggggcttcaaagcttaaaggcaaacgccccggacctcggagcgaatccggagatgctggctttcgtgcagaattatacggatatgggatttttctccatcatcttgttcttatttatcggagcgatcttaaccatgatcgtacaagcctccgctgccacgatggctattacattgattatgtgcgccaacggctggatcgattatcatttgggagtcgctttggtattaggcgagaatatcggaaccacgattacggccaacttagccgcattaaccggaaacacacaagcacgacgagccgcgttagcgcaccttgttttcaacgttttcggtgtcatgtgggttttggtgctcttctaccctttcacgaatgccgtctcatggtttgttacccatgtaatgaaggtcagtgatccggctgtggcggtatcctttaaactggcagcgttccacacagcattcaatatcagtaatactttcattatgatctggttcgtaagcttgatcgaaaagaccgtatgtacgcttatcaagcccaaggtggaagacgaggaataccgccttcgctatatcacgggaggtatgttatccaccgccgagctttctatcctgcaagcgcataaagaaatctcattattcgccgagcgtacggctaggatgtttaatatggtgaaagaattattctacgagaagaatgaggagaccttcctcaagacttatagccgcatcgagaaatacgagaatatcagcgaccgcatggagatcgagatcgcaaattacttgactgaagtatcggaaggccgtttgagttctgaaagtaaggaagaaatccgtatcatgctacgtgccgtctcggaaatcgagagtatagcggattcttgtaataaccttgcccgaagtatcaaacgcagaaacgagttcaaatccgaattcacggaggagcaaaacaagcacttggatcatatgttcgagctggtatccggggcgttaaatcgcatgaacctaattttgcataaaccggaactcgtacatgatgatatcaatccttcttataacatagagaacgagatcaacaactaccgtaaccagttgaagagccggaatatcgaggacatcaacaataagctgtaccaatatcaagatggcgtttattacatggacatggttagtgaaagtgaaaagctgggcgattatgtattaaatgttgttcaagcggttatcgagaagaaaatatagcgtatatttgtccttaacaatatcaacagcccttttccgttattgagagaagggctgtttttaatatatatccactatgaattataagtattatacgatcgttatccttggccttttagcattctccgcttgcgagaaagatgatatcgatattctggcaaccgacaatgaagtaaatcaatggatcgagcaaacgatgcgagagaattatctttggtattccgagttcccggataaaagttccttggactttagtcttgatccggagagcttcttcaagggcctgttatcctacaaagacgggaaagagctttctgatggccatcattacttctcccaattagagaaagcgaccgtaacaaagagcatttacgatgcgaacaactcatacggattcgatttcgcgacttccaaccttaaagacggaggtagtacctataaaatagccattgtcctttatgtattaaaggattcacccgccgaagaagccggattgaaacggggagactggatactcggcgtaaacggctccttgggttctatccaagactatgatgtgttgagaagcggaggcagcgtatccctccaactaggaaaagaaacaggaaacaccaagggattcgtctccacccgaagagttaccttgaacgcatcccgaacggtagaagacaccccattcctaaaagattccgtatacacatatggcaataagcgaatcggctatttgatgtacaaccatttcgcctccggaccggatgaatacgattatagcgacactagttataatctttatttgcaacaactcttcgaaaaattcaaaagtcgcaacgtcaatgagttcgtacttgatttacgctataatgggggtgggcttgtcaattgcgcccaattactggcttcgctattagtccgtgaaaacgttttaggagaacctttatgtatcatggagtataacgataaaaactccaataaaaatgagaccttgcctttactcaaaacgaccgaggtcatggcaggaaacttaaacctacaacggctatttgttttgacaggttcaactacggcttctgcctccgaacttatcattaactcgctacgatcttatctagacgttcgggttatcggtaagcagacttttggcaagaccgtcggtatgacgatctacaatgaatctaaaaaatatggctggatactttctcccgtcactttccatatttataataaggatcgggaagctgattatgaagacggatttcatcccgatgtagctatcgatgaattcaagagtgatctagctgaattcggagatttgaaggatcctttattaggacaagctatttacgagataaccggccagtcaccgctcttacgatccgctaccccgaggggcaaccgggaaatccaatataatcccccgttgtcctataaggataacttattactgattccaaaagactaaaaacaagatatatggaaagcgcatttcttaaaatcataaacgcaaaagtattaactccttcgggtctcctaccaaacgggcaaatcatcatctcggatgggaaaatagtggagatcaccgggcaaaaccgggagattcctcatgcggagatcatcgacgcaaaaggatattatgtggctcccggctgtatcgacacgcatgtacacggcggcaacggacatgatttcacggaagctaccccgaaagcgttctatgcgatcacaagagcacatgctttacagggaacaacggctttatatcctacattggcagctgcccctatcgataccttccgggaagcgatcaagacctgcgagcacatcatgaaccacccggaacagggagcccgcatcatgggattacatctcgaaggcaactatttgaatatggctatgaaaggcggacaagaccctaattatatttacccgcccaatccccaagaatataaggaattactaaacagtacccaatgtattaaacgctggagcgccgcccccgagcttgacggagctttggaattcggtaaatatgcgtcagctcatggtgtgttggtttcactagcccacaccacagccgattatctccaagtgaaaaaagcatacgaagccggattcacccatgctacccacttctacaatgccatgacttccgtccataaagaccgtgagtataaacatgaaggaacagtagaaggtatttatctcatgaaagatatgaccgttgaagttgtagccgatggtatccacgtaccgccggcaatcttaaagttggtatatcaaatcaaaggggtagaacgtacgtccttaatcacggacgcaatggccgccgccgcttgcgataacggtacggaacattttccggactcccgggtaattatcgaggaaggcgtatgtaaattagccgatcgctcagctatcgcgggaagtatagctaccggaatccgtttgatccgtaccctagtcgagaaagcggaaattccattgcacgacgctgttcgtatggcttccgaaagcccagcccgcctaatgggtattttagaccgtaaaggaacattggagaaaggaaaggatgccgatatcatcattttcaacaacgatatagagattcaagagaccttcatcgaaggtaaacggctctccaaagaataagaaatccaataaacaatgacttctcctatcttgtttttagataaataagggcatgaatgtatatggaaaacgtaaaagaacattactggagatactcattgatcaccattatattaggactaggggtaattctattttttaagattaccccgtttcttggaggtatacttggagcattcaccatctatatattgctgcgtggacagatgttccatctgacagaaaagctaaatatgagaccggcttttgcagctttactgttactgggggaaacaatcttatgtttcttaatcccaatcacattggcgatctggttggtaatcaacaaaactcaaaatattaatttagacccgactgtactgctaaatacaggccaacatatagcggatctagttcaggaaaagaccgggtttgatgtactggatagaggaaacttattaaaagtggcctctatactcccacaaatcggacagtttttagtgggtagcataagcagtttcgccgtaaatgtcgtcgtcttgattttcattctgtacttcatgttgataggcggaagaaaaatggaaaactatctatacaccttattccccttcagtgatcgaaacaaggatgaggtactcaacgagatcaatatgatcgtaaaatcaaacgccataggtatccctcttttggcggttatacaaggtatcgtagcggtgatcggttactttatctttcagactcccgatccgctgttatttgggtttctcacttgtatcgctacgatcattcccattgtagggaccgcattggtctgggttccgttggcggcttatatggctttaaacggagattgggtacatgccttgggattggctatttatgccttgcttgtcattacgaacgtcgataatctgattcgttttatcctacaaaagaagttggcggatatacatccgttaatcaccgtcttcggagtcgtaatcgggttgtccttattcggatttatggggatcatcttcgggccgttgttattatccttattccttctttgtatagatatcttcaagaagagctatttggataaataaagagtatctacaggacagggtatcttaaaaagtcatacctttacactacattttgagtaaaatgaattaatatgtcacgtagaacagtaaacaattggaagcctatcaaggggcaacctctcaccgaattagacaagaaaatcctatatatccaaaataaaggacatttagtacccacccgcaagcttatcaagactccagagcagattgaaggcatccgcagaagtagcgtgatcaatacaggggtgctggacttaatccagaaggagattaaagaaggtatgtctacagctgttatcgataaattggtgtatgattatacggtagggcatggagcgattccagcccccttaaactatgaggggttccctaaaagtgtatgtacctctatcaacgaggtcgtttgtcacggtattcccagtgagaaggagatcctaagagacggtgatattattaatgtggatgtctcaacgattttagatggttattattcggatgcgtcccgcatgttcatgatcgggaacgtatctccggaaaagcagaaattggtacaggtcgccaaggaatgtctggagatcggtatgaaagcggcgaagccgttcggattcgtcggtgatataggcaacgctattcaaaagcatgcggagaaaaacggattctctgtcgtacgggatttatgcggacatggcgtcggtctggaattccatgaggaaccggaagtttgtcatttcggacgaaaaggaactgggatgcttttagttccgggtatggtctttacgatcgagcctatgattaacatgggtacttggaaagtatttatcgacgaggaagacggttggacggtcatcaccgaggatgaactaccctccgcccaatgggaacataccttcttgatgacagagacaggattggaaattcttacctattaatatctaatgcaattaacgcttccgggccttttcccgggctaccttttccttttcccgcaaggcttccttgcgggctttttccttctctttcaatttttgcttgtataagcgttccttctccttgcgctctttttccttctgtttcaagcgttgcttataagcacgttctttttccttacgaaggtcctcacgagctttcagtttcgccttacgatccgcttccgcttgtttcagcttagccttgcgatcagcttccaactgtttctctcgatcagccttcgctttcaacagggcacgttcttcctccgcttgcttcttgagaagttcttcctgttctttcgctttctgctcacgtaattccttatccgccttttgctgagcctcgaaagccttacgagcctcttccttgcgggcttcttcttcggcagcttcccgtttacggatctcttggatttctttcaaggtcatgccttgatcctcaaccgccggctgaacaacaggaaccgtatccttacgaagggtatcgacaggctgaatctccggtttgtcaaacgcagggacctcaatcgtatccgggacgactggtatagcgggctgtcgaacaggttcttgaacaggccgttgttcctcctccggctctgtaacaggttgtttttccggttcaacttctggtttcaattcatctgcctcttccggcacttcggcttcttcctccgtgatcatttcatcttcagtcgcctcctcctccttagcggcttccatacgggctttccaacggcctgccagatccggtaattcctcaccgaagctctcatcgaagaaggtgatatattcatccaaggtcttgccacgcatcaaggtctcataattatcatcagagatcggtaacacggcaaccgctttattcaaggccgtagcataaccatccttaccgtatatcatcttataatattggataatctcatcaaaactaataaatcctttaatcgccagcatactgatcggaccggcctgctccaaagccaaatcaaactctttcaccatgaagttcgcgaagttataagcggcgacggcgaatagcaactgattctgatctacgctacccgtaggatataccaaaagcatctgataaggcgtattccgttccggattaaatacacgagccgaatcctcggcagatagcataccatcctcgcccaaaccgaatcgtaggttccaactcatacctttcactccgccctgcaccaaggcacgtccccgaagaacacctttcaacatctccccggccagttccgtgacatccgcattcggatacttctcgaccagtgctttcaaggcattcttaaacccttccgcatccccggcctgcacataggataacgcatccaagaacatgaatttaggcatcaatgtagccaatggatatttctcgcttacgtaccggaaactcttacgtacatacgctgtatcgctttccagatagcggtcgtaagtagcttgatagatcgagtcttgtaccacatccatcatgcggatattatactcgtaattcggatcagccacagctaccgcataatcgctttccgggaaggcgttcattagtttattcttatactcggtagccaacactgtatttccggttttcagggccatcaaatatacttgataatagctctccaaacggtgctcatgatccgggaaacggcgttccaaattctcgaacgcctcgacagataaggggatatcctccaacttatccttatagatcatcgccatattgtaaagaccgtctataataataatgttagaagcgtctatatcctcttgcgtgaaaggtagctgctgtaggtaatactcacgggtatgcggatcatcggcggcaacagccgacaggtcaccgcctatcgaatcggtcggcaacggctcaccgtccggccctaccatttgggtggaatctccctcggccagcatctcctcatccagattctcattaaaggtagagagttccttcttacggcggcgccagtgatcttccaacggacgacgtccccatttacgctggaactgtgtctttccttgcgctacggtctgagggttatagaaatagaaagacgctccaccggacgcattcggcaagacaacagcattggtttccgtaccgggacggtcgattccggtgcctttcgcttcctgctcggccagataagcctccttctcagccaaggctttcgcctcttcctcctctttctttacctcctcaatcttcttatcgataatcgctaaccgctccgcttccggtaatttagccaaggcttgcaaactgtcttgaagatggaccgcttctacatgcacgaccaattcatccagaatcgccgacaatttagaaacccgttcataatccctgtattccttttgaattccggctaaggctccgctaaagcaaggttgcgctttcacgtaatcccgcatcgtaaaatagatatctcccagctttatctggcagatcgccttatccattccattcaatgtactcttatcgataccgagttgatagttctttatggcattcaccgtatcttcccggctgaggtatacatttcctaaagcatagtatacttgatccagataatccttattcttctggcttttcgccattttctcgagcatcttcaccactttcaagtaattcgtacccgagaatacttctgtctgacggatacgtgaggcaaattccaactcatacggaggattcgaacgggctacctcaccaaaggtcttataagccaagccatctaattcttgatccgcatagatttgtcccaaaagatacttcatccgggtacgttgcttccggtttttctccgccttgatagcggtcttcagataagggatggcatcctcgaactgcccgttcttgatcaaataatcggcatacaccgccgcatattgcttcaaggcggaagcaggaataccgttcttgttcatcttatccaagatatcctcggattcatagaaccaacccatctcggaataacaacgggcttgccacaaacgggcctcggccacgacctcctcgtccttcgcataatgacgggctatataggaaaaggtagcggaggcttgcaggaaatcggcattgtagaattgcgcctgtcccatgatcagccaactattctttaagaaagggttatactcctcttgttcttggatagcacgtagtttgggattattccgccagcccggtttcttggccggtttcgcttttatggagtgtaatttaatagctttattacttttctcgatcgtccggtcgaaagggccgcccggctcggctttgtctttaggctgggcgctaatcggatacatatagatcctgtcggaatagttctctttatatccgtcctgttggcttttcagtgcctcgtcaaacgcttgttttccattgaaataaatattataacgggtcgtaaaggcatgataaaaacggctcgctttcgtgttcttcttcgtgctgcacgaccaaagcaagagtaccgttaataacgccactatgtaataaaacccttttttcattctttaattaacgccgtaacaacggttttattgctttcaaggccaaaaagaggaccaccaaaaacaagatgataaacgcaccggaaggcacgttcaggaaataagaaagaaccagtccggacacgcaacccagaaagccgatcgcaatacttccccacatgatcttcttgaagtcggaagtaaacaggttcaccgttatttgaggcaaggtcagcaaactcatcaatagcataatccctaccaaacggatcgaaagaacaattgtcatggcgataaagcacatcatcgtatactcgatccattttaccggcaggccttgcgtgacagcgaagtcacgatcgaacgccacgtaaacaatctcacggaggaaaagggagaatatgagtatcaacaataccaccaaccctaaaatccataagatatcggccgtagagatcgttaatatattgccaaataaataagcggatagattcggggcgtaccccggggtaagaaagatgaaaatcacgcccaaagccatacccagcgaccatacacccgctatagcggaatcctcccttacgttttgcgtcttgctcgcccactccacgccaaaggcagagaggatcgaaaacaacatcgccatcaagatcgggtttgttcccagataaaaacccaagcccaaacctccgaacgaagcatgcgtgatccctccgctgataaataccaaccggcgggatacgatgtaagtcccgacaatcccacaagcgatggcggttagcaagctcccgatcaaggcgttctgaaaaaaggcatattgcaataaatccatatgattcgtttcctaaattaatgagtacggcgttcgccaatgatcaggaatgcctcatccttcaaggcatccggcaaattgatccctcgcaattgcaggctacggagccaaccggccacctccacttcccggagggtataaagcacttcactaaactcctcaacggcttcctcatcgtaagcgtccgcttccactccttggaaccgatccagttcctcatcgttataatattcgattttcttgctgacggcggctaataaactatcccgctcgcaagtctcatgttgtccgcagcaaacctccggaatctcctgtgcctcggggatctccgagatctccccccgttccagcatcttctgaagtttcttattccggaaatacccggcgatagcggctacgacacccagacctataagacttatgacaatgtaccacataattcaattgaaagttgagaattgaaaactgaaaattaaagggctgattccctaatagagaaaccagcggccttaagatcttcccaataatggggataactcttgctgaccacttgcgggtgggcgatctctatcccctcgggacgtaccaaagcggcgggagcgaatgacaaagccatccgatgatcctcgtaagtggcgattaccggatgcgactccggttccctgcgttcaccgttccactccaagatgctatcattgcgatccgtcaacacataacctaatttacgaagctctgtcttcaatgcctcgatccgatccgtctccttgatcttcaatgattgaagtcccgtaaagcggaaagggatatttaataacacgcaagtcaccacaaaggtttgagccaaatccggttcattcacgaagttataaaccaacttctcacagatatttccagtatgctttaacactactccacgtttcgtataagtagtgcccactcccaattgagcgaacaacttcgctccggcggcatctccctgcaagctattcttgaataaacctaacaattcgatctcagcatttttcgataacgccatgatctcataccaataagaagcggcactccaatcggattccaccgtaaaacgaatcggcttatactcttggggaagtactttgatcgtattctccgtccaagaggctctcactccatattgctccatcaattgcaaggtgatatggatatagggcctagagataatagcgccctccaaatgcaacgtaaccccattttctgttaacggggcgatcatcaagatagcggatatatattgagagctaacatttcccggtagcgagatctctccgccttgcaaggcgcttccgaaaatacgcaaagggggataaccctccttctccatgtactcgatccgggcgcctaaagcgttcagcgcatccaccaacaccttgatcggacggttcttcatgcgttcggttcccgtaatcgtccattcgcccaccaccttcgagaggaaagcagtaaggaaacgcatcgtcgtacccgccgcacccacattaaaatcccgatcgttcgagtttaatgcctttaccatcaaatttgtatcatcgcaatcggataagttctccacatcgtatgcgctataacttagcgcattcaagatcaatgccctgttactgatacttttagaagcgggaagctttacggtagtccggatagcggaacccggagcatctatctgataattcatcgctttcgtatattcaagattcaagaagcaaaagtacgaaaattagcgtacatatggagtataactgcgggaaactttcttctttcctctcactacatgactccttacattaacaacggacccctttgccgacatgatacagaaaccggccttcggctttctttatgcttcttctcgaacaccaatcgtgacaaggcgttcgtttaaaccgatccaaccagtagacgggaggggcaataaaacgcccttttaagtgagaatattcccgttttcaggcacgaaaggcgatgaaagcctacacgtatagtcgcgttgggcgacgccaatactgccgttaggcattataaacagtcacgaatagggttgtcagtagtcgtgaataggcatcgtaacccggttagaacccagtcgtaaccctatcggatagcccgaagaagtcaatggatatgaattaggatgaattattttcgctagaatgaaaggcggtttttcggtattgtattatcaatgaacgaattattgtttttttcttgcgtatttggcaacgagtcgtacatagtcccggaaaaatcggttctccgggacttcagtttacaaaatgtcagaatgtcaaatcgccaaacggtcttatcacaaggccttcatcttcaagaaatgcttccagaaaaagaggatctggtaatcaatagaattattccagtattgtgaatcatgattacccgggcgagtgataaagtcgtggtcgatgccttgttttaataacgcctcgtggtagttcttattcacctccaaaaagaaatcgctgtcaccgcaatcgaagatcaaagcgatctggtctttcctcaaggttggaaccaaattgataaccgtgtacttctcccagttttccggatattttgccttctcacctatttgtacgctcatctcccagtttttcgggaaagggcggatatccacgccaccgctagtacttcccgcagcggagaaaacatcgctatgacgaaggccattccacatagcgccatgtccacccatgctcaagccggtaatagcacgtcccttacgatcggccacggtcttataatgggaatccacgtatttcaccaactcatccgagatgaaagtctcataccgtacatcagcgttcaaagggctatcccaataccacgtattcttaccatccgggcatacgaaaaagatacccttctcatcagcgatcttagatagatccggcttgataccgacccatgtacgagcgttaccgccatagccatgtaacaaataaatcaccggacacgctttcgtcgcagccacatccggacttaccacgactacctctatacttttattcatcgaaggacttttcacttgcaaagtatctaccttcgccgcctgtaaaccgagcggaagcaaacaaaccaacgctaccgctacctttttcatccaattcatatcagtgaacattaatgattaattccccgtagccttgttttcaaggaactacggggacaaatatacagattttacagccaaaaacttatttacttaacgagaaaggacgatcctctttcgcggttcctctcgtcttctccggttgattgcccatttgaagctccagcacgcccccattcacgatatcgctgtaatggatataattacgtgtatgtctcttcccgttcaaggtagcgttttggatatatacgttatccttactattccctttcgcctcgatcacgaacttcttgccatcctccatcgtaatcgtagctttccggaatttcgggctacccaatacatactcatccgtccccgggcaaacactgtagattcccaacgcgctcaatacgtaccaagaagacataccgccttgatcctcatcacccggataaccattttccgagctattatataaccgatccatcacctgacgaatccaatattgcgtcttccaaggctggcctgcgtaactatacaagtaaatcatatgctggatcggttgattaccttgggcgtactgtcccatcttcgccaattccatctccagcatctcatgaattttcgttccgtatgttccatatttcacgataccgggtaaagcgaaaacagagtcgatcttcgccacgaaacgctcatcacctcctgtcaaatcgatcaacccttggacatcatggaaaaccgaccaattgtaatgccaagcattcccctcgcaataaggaccgccccattcgaaagcatcgaaatccgcccaactaccatccaatttacgacctctcataaaaccgacagatggatcgtacacattcttgtaattataaatctggcgggcaaagacctcctcataaaacttattcccagtcattttcgccaactgatacgcacaaaagtcatcatagcaatattccaacgtctgtgccgtagatcccatggattccggataaggtatatatcccaactgataataatccttccaacgaacccgtccgttggcaccgccccaaggtcccttattcatcgcctcatgcgcatacgctttcaaggctttctccggatcgaaagtgcggatacccttcacccaagcatccgtcaataaagagatcgagtgattccctaccatcccgccggtctcactcgggaacgaccaagaaggtaaccatccacattgctcctgagcgtctagcaaggcttgcatatattgcccctgcatcgtagggtgcaagatattggtcagcgggaactgggaacggaaagtgtcccaaaaaccattatcggtaaacatatatccatcatgaatcttctcatcgtacggactatagtagtaaggagaaccatcctctttctcctcataaaacttatgggaaaacaaattggcacggaacatgcaggagtagaaggttttcatatcctcctcggttccaccttccaccaacacacgattcaatagctggttccatacatcagcagccgcttgcttcgtcacttctaccgatgagtgcttacctagctcacgagtcatcgtaacctccgcttgctccggactgatataagaggtagagaccttggcctgtaccttagagcctttcgcaaattgtacataggcaccgataccttccccttcccggctcaaattattcttctggatcgtattcttacgattctcccatgtaccatagctaacgaaaggtttatcaaattgaatgataaaataattcttatgtgtcttcggagagaaagccccattgtgtacatagccggtgatccggtggttcgctacatcgatttgtacctgactggttttcgtatagccatccagtacgagaaaagcgtctcccttcgcgggaaaggaaaaacggaaatgagcggaacgggtagttggcgagaactccgtggtaataccattctccaacgtaaccttataataatgaggcttggcaatttctttatcatgagagaacggagtcgcccgtttggactcatcaacaaccaattccgatacaggcatcaaagaaaataccccgtaatctcccacccaagggctacattgatgcgtcggttggaaaccccggatcgtagtggccgagtattggtatttccaaccatcaccattcttcccggtctgtggagaccagctattcatgggatagggaaccgccgtagtcgggtaggtatttccccaactcaattcgtaagtcgagtttgttccttgcaaagtatttacgtattgtaccaagtctttctccgcaaaaacagggaaagagagggttaaacagagggctaaagccgccccctgtttataaaaagtattgagtttcatgttattttatttactgattaattattcacgccccaatttgtattcggctcggggcccatctccaattctagtacgccacctttcatgatatccctataatcaagatagcatctcgtataatccgtcccgtttaatttagcggattggatataggtgttttccggggtatttcggttggctcgtatgataaatgtattcccttcgccaacctgaatctcagtcttctcaaaaaccgggctggatatctcatagcgagtatctcccggacaaaccggatacaaaccacatgccgccaatacataccaagcggacatctgaccgacatcctcgtttccaaccaagccttctaccttattcttatacgccttatcgcaaatgaaacgagaccatttctgggttttccacggctgtcccaaatgattatacaagaaaggcacatgatgaaccggctcgttcgcatgattgtaataagcgttccacaggaaatctgttggtgtcttgtcgaacatcgtatccagatcggcgatcacccgttccgttcctcccatcagttccaccatacccggaatatcatgaggcacaaaccacccctgttgcagctcattgcattccatacagccgtaccattccttcagcttaccctcttccggccaagcctcaaaccggccattcgcttctctcgggcggaagctatgtttctccgcatcatataaattccggtaagactgagccaacttcgcataataaaccgcatcctcctgttttcctaatgatttcgccaactgagacatacaccattccgtatacgcatactccaaggttttggagatactctgcggattcggggtatagcccaactccgcattcccgaacattctcgaggttttatccgcataccgataagccttttccatatccaagctacaaatacctttcgcataggcatccgccaagaccgatatagccggatttcctaacatacaaccgctataggcgttcaacaactcccagcgctcatagtactcacggccactctcctctgccatcgttgtcaatgacttcaacaaatcgttcaccaataccggattaataatcgtttgcaaaggcatctgactacggaacacgtcccaaccgctaaagatcgtacgtttcgtgaacgtatccgacttatgcgcttttccgtccgcgcccatatattgaccatccacatccgtgtaaatcctcggatcgatcattgtatgatacaaggaggtatagaagatcaccttctgctcatccgttccaccgctgacatccatcttagccaaagccgtatcccataacgagcgggcacgagaacgtaccgcatcaaaatcccaatccttgatctccgctttcaagttcttttccgcaccctccaagcttacaaaggaaataccagccttgaaaagaacctcctcattcgcctcagtctcaaactccgtaaagaacccgaggtgctcgccctcatatgcctttggtctctccgaaatctttgcgttcgctgtcaatatctggaaagccggactctccacgaattcccgatgccgatcctgccctgccgggatatccacgctccatacaccataatctttcaacggtttggaaaactgcgcataaaaatacacggtgtatcgggaagaaccttcaccattcccccagcctccaccttccggcgtacattccattcgtccggcgatcgtatggtcatctatcacttgaaccgcctgatacgtagaagtacctcctacacgacgggctaagtccaactggatgcgggactgcttattctcggggaaaacgaatctcagcataccgctatgaggagccgctgtcgcctccgcttgtatctggtaatcgctcagcaataccttataatatccagccttggcctcctcggaagatttatcataccgggaacgatacccggctacgcccccctcttttcctgagttcgtgcgcagatcgcccacggtaggcattaccaataaattacccagatcaccataccagccgataccactcatctgcgtaaaagcgaatccctcgatcgtctcatgctcgtagctatatccggaaccattgtcgccccccgtaatcgtattcggacttacctgtaccataccgaaaggggtagtcgcaccggggaaggtcttccccaagccatggtaagcaccggccgcctccgtattcgtactcgccccgataaagggatttacataatcagagaaatgaacctcctcgatagtccgggtcggaccggaacaggccgttcccaccaatgcgagcgataacgccgtagtcgttatccatcttaaacttcttactaatcgtatcatttctttataagttctattctacgtaccttcggttgggcgatctgatacatacgatccaccaacatatcgatttgttggttccaagcctcccggatctccggatacatcatcttggagtagttatccagatggccggccaagaagatattcgtatgaaggttcgcccttaacgtatccatagcggcgatattatcctgaaataacatgcccttccgcttcaagatataaaattccgtccacgcatattcccggaaacgtttctcgatattccaacgttcctcattcaaatgcatgacccgaacggcctgctgatattgcggtgtgttcgttaacgccgctaagttaataccttttgccaaatcctcggccgaaaacgtagaaattgaatccccgtctatctccaacctatacgcacctttcaatccatccacccgcaatacctcttgattaagatcctccataatcggagcgtataaggtcgcctcatattgcgtatgttttttctcccagccccgagagatcgtatccatcggataaggtaaagacttcgctaaataggtaaaagagaccgtacccttgtctgatactttcaattcattcacgaaacaattctcgttcgccagcaccacacgtcgggaagcatcgatatcaactttagcgaccggtttacccgccaatccctgagacttcaagaagaaataggccatcaacatattaccgtggttatccggatgaatccgatctccttgcattaaggtaaaccgcggatctttcgcttgctgtaccctgttcacctccaataccgggttgtggaaatccacgaacgcccagtcattcttcacggccgcctctctttgcagacggatgattttctggatcgtagcgttctttccaagaaaaggcttatttttctcattttgccaagtctcgtcgtacggcgtgccaccgatcatgatcacccttgtatctttgtgagatttcatgatcttctgcatcgcctgaaaggtcgtatctacccgatacatttgccgctccacgaaagccgtaggattatcgccgttatattcgaaataaccactatcgttcataccgaaagtagccgtaaccaccgtcggatttttaccatatacatcctcctcgatccgttccaacatatcccaagaactgtcaccaccggtaccggcgctatacatccgcatccgcatatccgggaaatgagtgatatagtacaaccatatataagaatgataatgtccgccctctgttatgctattgcctaaaaaaacaacccggtcacccctttgaaaaggggaaggagttttctgcgcattgccacacacaaacacagaaagcatacacgccaaactaaaaagccatcgattagttctcatcttatttacttttggacacttagaagttcaattgtttatccgatacggccacagccacgaatgaatcggcacagccataatacagataccatttattccggtaatagaccagaccttccacgaatacggtacccgcagggtattgaccgcttttttcaaaatcatccgtcggttgcaagaaaggcttatccaaacgaccgatcaattttgtcgggttatttacatcgaacaatgcttgtccggcacaataagagttcgcaggataagcggtatcccctttttctcccggttcgtttttaccgttatacaacagaacgatgccatcctttgtcaagatagcgggaggtccacattcggtcaactggctatcaaaatagccggaacggggagagaacaatttaagcaactcaccattctcgtccaacagtgggtcccaatctgttaaattatcggaggtagccgcatatacattcttctccccccagtacatgaaatacttgccattcactttcgcaatgacctgcttatctccctttaaagtcgtgactaacgatgcggatttggtcgcctcatccttgaatttgccattataggctttctcaaaagccggaccgaacttcgtccagtgtttcaaatcctttgaggtcgccaccgccagacgaggcaccttgcggttccattgcgtatatagcaagacatacgtaccatcctcggtcatagcaatacgaggatcttccgtacctccgggacattcgttctctacttgattatctttagccggataaaaagcaggcttcgtatccctctcgaaatggataccgtcagtagaggtcgcatatcccaaacgggaagtccgggaaccgattccctgagcggagttatcttccgcacggtacatcaccacaatcttcccatcgtaaatcgtagccgccggattaaatgtgtcactctcctcccatgctacagaatcttcccgcatcgggcaataaaacttagttggtaacggcttaattaccggattcactcctgtcggacgctcaaacccgtccaagcaccaagctgtttccgatacagcttccgccgtctggtctttcttttgagagccgcaagctacggtaaccaatcccaataagccgaaagtagagactaataatgtttctttaatcatgttattcgtagtattaagttatatttattttccatatgaagggggagctatccgagttccccacgtcttatccggcttcccggataatttatattccaaggtcgccccccgatataaatccgaccaatcgatccaagtgccctccatcttctttccatcaagacttaaggaatggatatactcttttttctcatcaccccccttgataatcacgtctccctcgggcaaatgtaaaacaatcttacggaataccggactattcacagagaaacctcccactccgggaatctctggaaacaaaccgatactggcaaagacataccatgctcccatcgatcctaaatcgtcgttgcccggcaaaccgttcacacggctactatattgttcgttcagtatacgccggatcacttgttgcgccttataaggagcccccgcccaattataaatccaagggatttggaaactaggctcgttaccggaggcgaaccattcatctccataactagcgtccaaacgtcggaacatctcatccaaacgcttctccgccgcttcctttcctcctatactatcgatcaacccttgcaaatcataaggtaccatccagaaataattcttatatgtcgattcccgccaatccgcatcataacgtttccacgaaccatcctcgtttcgggactgcaaccaaccggtctccttattaaaaagattcttccagttcatcgcccgttgcgtataccaattacaaaccggctcatcattgcaggcttgcaaggcgaaacggccaatcgcaaaatcagaagatgtatattccagtaagatcgaagcgtcgtaataccctttctccaaatactgttccaagcccggtcgagtcaaaacaccttgggaattagcccccggcacttctgctccataacgcatagtccgcagtaaagttcgaggatcatagttgcgagctccaaacgcatacgcattggctacaagaatcggagtcgggtccccctgcataacacctgtctctatattcgccagtacccaacgagggaagccaccaccggattgctcggcaaataagtaatgagacataacgatatccgaggtctcctcgggagctagcatagcgatcaaagcagtctgcgtacgatacgtatcccaattactgaaagaggtatagaattttcgggctgtcttatgcacttggctatccgcccccatatattccccattcacgtcgctacaaacattcggatggattaatgaacgatatagatgcgtatagaattgcatctggcgatcctcgttatctccctctacctctatcttcccgaggtattcattccatttatcttgcgtcgcctgacggaccgcagagaagtcccaagcgggattctcaaccctcaaattctctcgggcattctccaccgagacataagaaacaccgatcttatactgcaccgcctgattcccctctttcaacggaaaagtaaaatacacccccgagtgactgccttccgcaaacgtatgattcgcatgtagtcgctcctccttccatgtaccaaaactctccgcatccgcatcgaactcagccacaaagtaaactttatagggagttgggattccacagaaagcaccaccctccgcatatccctcgcaactatgaggacccgtaatcttaatagcggctacttggatagaggtagcggctactcctcctccgataatcacggtaccctgcttttccttggaagaaaacgtataacgagccatacccgtacgttccgtaacggttaattccgcacgtatagaatgatctacggtggctgcgtaataaccggccgttccgatctccttgccgaccggagtctgcatattcaagatactatccggagaaacccgtaaagctccggcaatcggaagcgtagggaaatttcccatatgatcgcatcccgcaccactcaattgattgataacaaagcctagttgtttcgtgaaataagtcggggtaaactgtaccataccgaagggataggtagcccccggatacaaatatccggaagcccacccattaccttgagtccctatcagggtattggtcttagaaacgagatttgacgcatttaccaaacctccacacaacaagaaaacatagctaaccacacatattcgccttaaaagctgtttacatttaaacatggtaatagatcctttttattatttagccttttatactatatacccttcaatagaataaaacacttacggcgtaataattaaaaaacagctattaacataagtcaacaaaaagggaatcatatgattcctattccgcaggcagcgatagcgtgtgttttccactttccaacaggatcgaacccgccgatatttctacattattcccatctaacacacaattcgatacgttaaatggagcgataaaggtcgccatactattcgccggtatctccagatcgagggaaagcgatcggttctccatagtccaagacacacgtgccgtaccgtaaggggtctctctcgccgccctcgcccacgtcacgccattcggtatctgaggtttgataaagaaatgtttatagcccggctcatcctcatccggcaagatccctccgaccgcctgacagaaccaagcgccaatgccattgaaacaattatgaaccttactacgttctcccgaccagtattcccaagtcgtagaagccccttgatcgatcatatatagatatcccggtagctctctctttttcagcatggaatagagaaaatcagcctctccgttctttatcgtccaatcggtcaagatcgtaacacccaccaaaccggaaccgatatggcccttacaattctccaaagtctctcgatataaaccttcctttacctcgggcatatgctgttcatctgtcacgccgaccaacatcggataaatccgatcgatctgggagcctgtagcgtactgtttcttctccggatcatagaaagtcttctggataagctcgttcaatcgttggcgacgctctttatacttagcggcatcctccgctttccccaataccttcgcgatcttctccatcgtagtgaggcaatcgcttataaagcagttgctaaccagatctaccgatgactgcgccgtataatcgacacccgccggagccaaccaatcccctaaataccatgcccgataatccgtatccggccaacgtttcagcaatccatcgaccgtatacgcatccacataacgcaaccaatgtcgcataaccggataatatcgctcgatcagacggctatccccataattcaaataagtctgccacgatcccgtgataataaagccacaccaatacggaccacctcccgccgggtatggattcggtacgcaatgcggcatacccccatcctcacggatgcaatcctgccacatctgcatccagttcatatacacggaagagccctcatacaatgtctggaaactcttacaagaggcatttccatccccaccgtatcccatacgctcataatgcgggcagtctacgatataaccactgaaagctaggttcttgaaagtatatttgatcatcgcatagatagcattcaagtccggatccgagcactcgaaagacgaggcatccttataatccgtatgaatcagatagccggttacctcctcgggggctttcgccaaaccggatatccttatatattgaaacgcatgatggttaaatttattccggaatacctctttgccttgtccggaaccgatataccaatcctcatactgtccgttctcctcttgtggcttgaaatcttcgttttcatttaaccaatccgtatattccatacggacccggtggccttccggcaatttcgggaaactcagctcgacccaaccattcaacgcctttcccatatctacgagccaaatactgtcccctatctgcttgatttccttgggacggataatctcttgtattcgattaggctcacacatctggggacttacctctatcccgggtacctccacctccaataccggcgtccaatccagtttgtcaagcgtagccgttgtcaaatccggcaacgccttccgcccatccacacattcacccccgaattgatggggataccaagtaccggtaccggtctcaccatacatacttccccggccttcccaagagctatctgtaacgagtaacgtacttgtagcgccatttctttgaatctcgtccaattgcagtttaaccaacggcccatcatgaacggcattaaaagtagcttttctgtaccagccacggcccaaccagagcaataagtcgtttattccctgctttgcgtacggcgtaagatcgtacgtcaccgataatgatcttttgtttaattgagataccgcaggcgagagaacatcttccgataccttcctcccatttaaatagatctcatgataccctaaggagtttacatgaaggagtaatgtggcatcacggtcttgaagctcgaacttattccttaacatcggattcttctcatccggcatccctatatatttcccttgccattccgctttatccaaaagcccgatcccaaagcgattgattggactccaatccgaggattcccccttatcgtcccatacccggactttccaataggccagcacactagatcgcaactctttccctcgataagggaccatcacggaagcggacgattccaccttacctgaattccatagatcggctttgccttgagccagcaaggaactatccgtggctacttgtatctcaaaatacgcttgccgcatagtttgcccgtctgtctcgattttccagctaaaatggggatgggtattgtcgatcgcaaccggattctccaagttctcacaacgaagatcttttaagatgaacctccgcccggattcacagcccgacatcagtaacaatagggtcacaaagtagatagatatacatttcatgataaatagattgagattacgcatgaatatactttctaatggcttacgatacttatatccccggtaaatattaagatttattaaacaagaaaggcgagccactcgcaaatgactcgccttcctacgattcctcaagaatggctagaagcggatcttgtaggattgattttcgatacggatgatataggcaccttgcggaatggttatcatcgtctcaccaattggcaaggttaaagccttatatagttgaccgccgaatgtcactagataagccgtactcacatgagcggactggatatgcaataccccgttcgatccccagactttcaagtcattggattcgagttcggcattgcctacggtggcgtttttcatgattccggtgatagagatcgtaatgtcggacgcgatacccttgatctcgtatttaccgtcagaggtcggctcaatcaccttatcacctactttcacgataggggtagattgatcgtagtccgcttccagcgtaagagagaaagagaagctgccaccctcttccatggagtaggttccggcggaaggattcaacgaggcaccttcaacggatggaagaacgacgctgaatgtcactaccggatccggttcggaagagactgcggttactttcgatagggtggtcaaagtcgtagcgatctggtcgctcaccttacacgtgattacgcaacggtacgtacccacctcgggagcctctaccttataagaatcagccaacggctcggcagcacgtaagagagacaaggatatcgcttgaggtgctggggtctttgtcgttgtcttcttatcaatccatgtaccattctctaatctctgccattggaaaatcaccgaggtataagattcgccggggacagcggtagccatcaagtcaatggaggagccttcttccacggtcttatctccgatcggagcgatcgcgagagctcccgtgccgctaacttctgagatcaagccgacactatctgcgaatatacccgcattctcaaccgtagtattgactagcttggcttgttcatcggccgacgacaagatcagtacgccctcattcttgatctcacctaaccggttcgtgccggagagagccagttccgctttcgcctccggggtaacagtcagcgtaggagctgtcacgttcgtcaattgaatggtagcggtatctttagcggcagtctcatttgatatcatgatatcccctactatcgcgttctctattacagaatcctgttgattgatcctgagagagtctagcattacggcttccgccacgatcttcagatccgtgaggacagatggcacggacaaggtacccttggccttgtcatacgtatatccctttacgtttacctcaacactatcgggcagttcgtaaccctccagcgccagtaaggtaaggttcagcgtactatttctctggatggatttgacggtatccgccaatgagatgttcttcaagtcgtatgttatcgtataagaatccttgatactgggatcgtattcctctatgttcttgaatttaccccagaaatcattattcttatagacatccaagcagccttccgggaccaatatcttacaagtcaaggtatctacgcttttaagcgtttcgacatcaattcccggcattaacggtgacgagagttttattgtccgtaaattgacgcaattccttattgacgaacccatacctttcactgaggccggcaccgtcaacgaatccaaggaactcccgaaagaatgctgtatcttcgtcaccgcataatctattccccccacggtaaggagagaagggataatggcattacttccccctttatagttagaaagcgtagcttccgcattggccttatctaactcataggtattgactccctctttatattcctcatatccatctattgttatttgcagatcaccaaacaacgctggtacttgaatcttttgttcttggtcattaattttcagaaagtccggtctacaatactctcctgtctctatagatctgcaacttacgctaaaccgaagcggcgttccatctttgcttcgaacggttacatttacgtcctctccgtattttactgattccggcccatcaaaacttacattcttagattgataagtaatcttcaaatcattggatggagctactccctcatcagactcagagatattagcctcttgtaccggaagacctgaataagccttataaaccttaccggcccccttaggaacaataattttcaagttatccttgtcaacaacatcaaacaaataacttgctataccaacaggaatatatcctttaaatgtgatggaagccagggacttcgggagcacattattaaaatacataaactccttgaccctatatttagagccaccaaacgtcacagagtccggcacaatcagattcttggttgtactcgggacatcgtttatacaggctgttttgccatcacgatcaagactgtaggcatatcctcctatcacagctttaccatatcctgtgacatgtataactacatcccctgtcacattggatatcttgtagaacttaggttccatcttatcttcctccaaatgcccctgtgaattttccatagagacactatagctcataggattcccatacgattcgtatttaggttttaacctaaaggtgaacgtctcgccatgtccaaccttcgccggaccttccacaagctccatgttcttaagatcataggtgatcttgtgcatcactttcgcgttctcttgcccactggcaatccacgttccactacataagaaagccatcaccaacagtgacagtcttaaactaattttttgtaaatctagtttcataagctaatatttataatgaacaatcgttttaacattcgttcacaggtatgctcatagcttcccgtctatgaccggtgagagagcctaggccatgaaccatgagagagcctcgtctatgaggggtgagagcctaggctttatcagccctcatagatgaggctctccgccttatcagatctcgtccgggctctcgctatcgcctccgcctccgatacctaccgtcaagaggatggggaacttataggtacgcgggtccttcaccaagccgtaattcgcccccgcctgcgtagtgacgctcagccagtactgcccctcggcgagtggcgggatctggatgatgatctcgctcttggtgttgcgcacgatgagggagaccttcacgggcgtggcgccctcctcgtccttggtgaagtagacgcctacagatggatcatcccccttgataagcagcgtgctgccgaagatgatagccggagcgtttggagtgatatggaggttcttctcgttcgtggtagaatccgtgaggctctcgatcatcgggcccacggtagctacgtcggcgttcacgtagatgttttctagcgccttcaggagggtggcgctgggggtgaacattacggtgatcttattctccgtagagcggaagtctgatttctttccgtcgaacgagccgttgatagtgagcagccattgcccgaacttgttcaccacgcaacggccttgggcgagggcctcgatcatctcgtcgtaggagaggtcgaggatgttggtgatcgtctccggacgatactcggtacgtttcttcacgatgcggttcgagatgtctgaggttcgcgtggttccggtaatgcggatctttccggtgaaatcgccggttttctcggttaacacgttgtcgtacagatctacggtcaagatggtcttttcttctgccatgatgttttttgtctttaatgccccgtggtagtggggcgttaccttttaataatgtttatcacccttattcgcgaaataaggggaggagatatcgcacgtccaacataaactaaaaaaacacgcataaccactatttttaaccgcatatccacgatatatgcgcaataagcataaatttggattaattagaggatacgatatctgtatccccttcaattcctatttcttaataaatagataaaagtgattgtttatcaataatattttttacatttgccaagccttccgttgaaaatagcctattataggtaatttttatgctgaataggctcttccccttatttcgcgaataagggtatcacccagccgccaaaagcaaatccacctcttccgtcaccctagcgttcgcacgattcaattctgactgttccaaagaggccagataaaaacgtgttgttttttccgaggtatgccccaacgcttggctaatgatcgataaagggacttgtttccgcaaggcgttcgttgcccatgtatggcggaaaacatacgaggtcagatgaatggggcgagatagcgcacgaccgatcttcttcaacgagttattatacgaacgcagtatcgccttgtattcctcatgccctacctctctacccggagataaaatagggaaaaggtacggggaagaagcgtccgcatacttattaatcaaccgccgcatccccgctgttatcccgacacggattaagatccccgtcttcttacgccgatatacgatttcctcgccatacaggttcgccgtagtcaagcgagccatatccgcaaaaggcatgccgcaagataaataggcgaacgtacaatagtcgatcacgcacgccaaatccggctcctcagacttcaaggtcacgatctcccggagcgactcgtttcccaacgccctagatccggctctttcccgcttcaagttcaagtacgcgaaaggcgatacgacgcaagccggcaacagaccatcccggcaagcttggttataaatcgagcgaaagttgctgaggtatgtattcacggtattcactcgcaagccggcggattgcagataagcgacaaaacggcttattaagcccggggttatctccgggaaaagaaggtttctcctacccagaaaggcgcagatccaattacgggtagtcctatataaatcggcggtgttatgtttccccgctaaacgtttctcccggatgcgttcggtggcataggtataaaatgtgatgcccgccttgcccaagcagttattctttcttttgctcatatctccttttttgatgattaaacgtattattatctaccatcaaaaatagcataaaaacaagatcaagccaagtccatctcgggctcgtgaatcaagtcggtcatcacgtagaagtcggcgtagcccttgttggctttatactccggataaataagtagctacggggaatctttatagattaatgttatccaacttaaaagaggaagggattatcccacataagtcggagacaatccctttctgccggaataaagtacttttagaaagatacgtctacagggacgacctcactataattaaccttaccgtttgtcgttacaccaacacggatatacatcttatttccgtttcctttcatgatggcctgcttatccttattgttgaaactcgcactttcacttaagccgatctcttgggttaataccgtatttaggatatccttatcggacacgttcgtatagtcaacagtcaccaattcctccgagttaccggacatcttatcgatataagggctgatatgccaagccaaaaaagcattctctatcttatagtcatccttgctacgagtgatcgtataggataccttcaacttcttgttctcgaatacggcgttgtttacatcgattcgggcgtaaggaatcaccttgatatcttgatccgtcagtccaccggcgttcagatcaaccaccatcgtatccaccggatagaaattagtctgctccagcgtcaagatatattgcttactgaacatccacgagttctcgtaagtcccatcgatcttgggatacgtgataaccggaagctgcgagtaatcatcacccgtagaataataacggtcacgctcatacatacgtatctggatactgctggtaccctgtaccggcatcgggacaacctcggaggtttccgcatcgataaagcggcctttgataccggaattaggctcatcataattatcatcctcacaggaggcaaagaggcaagaagccgccaagacaatcgctatattatatatgatctttttcatgattctttttcctttcattaattagaaaccgggattattaggagccaacatcgggttgctacccatatcgctatccttgatctttatgtaatagttacgttccaagaataccttattaggtttcggagccttaccagtcgtaaagatatatttaccttccccccagatataccatggataaagcgccatggtcgggaaatcggccagtttgatatgcgcaatatgccaacgctttaaatcccaatgacgatgattctcatacgccaactctacgcgacgctcattacggatacgatccaatgaaacctccccggcagaaagcgtacggatgcccgctctctcacgaaccatattcaatgcagtagcggcatcgcccgtcttgcctaattccatagcggcttccgccttgttcaaatacatctcggccagacggaacaccggccatggagcatctgatttatttccggagatatccgtcactccctcgtctgagaacttcttcgtgtagaagccggtctttccaacatccccggtatcccacacgccatccttacctaagatcttcatttggttaccttcctcaccataatactcgttcacgttattgctggtgataaaacgggcatccccagatttagaggcatcgtaaataccccgacgaatctcgacgatccctcccctacattcatccatcggtaaatagaaagtcgcccgaagacgtgggtccttgtccttaaatagatccaatggagagtcatatttgatataattgccggaagcatccttcaatttcaaggtaccgtctgaaccatctttatattcaaaagcctctattaaatcgagtgtgggattctgtccgcagccatagccattctgcacgaagctaaacggcacattcaataaatcccaagaatggcctagatcggtagccagaaactctttccagaagataaactccgaacatcctcttttctccagaaacatattccggaagttctccacccggtccgcatactggttgtaaagcgtatatttacccgagttaatcactttatccgccgcctcgatcgatttcgcccaatatgcgttagcgtcatcactattcacgccaacgataccgttcaattgcactttgccgtatttagcgatcgatgccgcatacaatgccgcacgagattgcaacgcataagccgcatatcgagtggcacgggttctttccacagattcacgggtctccggtaattccaaagcggactcttctaattcagttagaataaaatcccagacttcttgctccttatcacgggaaacttgtaagccatacaagtcttccggaccggtatattgctgtacttctgtcacgataggaacgcctccgtagcgttttaccaaattaaaataatggaacgcacgaataaaacgagcctcggcgatcaattgctgccgtttgctttccggcatctcggccgcattcagctcttgcaacaccagattcgtcgctcgaacagccttaaaaccgtcctcccacagaccaaaccactcatcattgaaattcgcacgggcaacgtcacccgtaccaagatccccagcttggtaagctcctgtaccctcatccgaagcggtcactaagctgacattccaaacatcccatccctcaaaataagtggagttatgttccatctgcatctggttatacaatctagagaacactcctgttatcagattatcatccttccaaacttcctcgtccggcaaacggtcagtcacaggaacatccaaatcacaggaagaaagtaataaggaagcgcaacacaaggaataaattatagttcttctcatcttcatttttcttttaaatcctattagaaactaacgttaacaccgaatgaatatactttcaattgcggataatagaaactttgccaaccttctattgcctctggatctgtatatttgacattcgtaattgtcaaggggttatacgcattagcatatacgcgcaaatgctcaatacccaccttgcttaaaagattcttgggaatggtatacccaatctcaatagatttcaagcgaacatagtacgcatcagtcgtccaataggtggattttttcgagttattatcattaccctcaatacgtaaagaggggaatttgcccggtacccactcactatccggatcattataatccgccttatgccaactatccatccatacacggaaaccatttccctcgcccggtccacggaaaggactggtcaaggcattcaatacctgcgtatagttcgaggctccttgaaataagatattcacatcaaagcctttccaatccgcagctaatgtcagcccgaaatttaagtcagggaaagttcctttacctatcactttctcatcattcgcatcaatcaagccatctccattcagatccttatatttaatatcacctggacgtaacgatgaattacctttaccatcttggatcggtgaattatagatctcatcataagactggaactgaccgatatgttcatacccccaagtaacatttttccaacgatatgcgccattgtctctccaattcttatattgattcagtggtaatgcctgctccttatacaaatccttttcacgagcataagccacatttcctttgatctgtaaattcacgttcccgatccgttggacagtacctaaagacaattcaaaaccacgattatcactactattcaaattctcctgcggcaaagggataccagaggtagttggtaaagaagtgttacgtgtcgccggatatcctgtcgtcttgcgatagaagtaatcgaactcaaaactaagcttaccgccccagaaagagccatccaaaccaacattcgtagtcattaccttataccaagtaatattcggattcgccaaattcgcttctttcataccattcgtaatcgaagccgaagagtttcctgcgcctcccaatataaatcgatcctcaaattgccatccactgacgaactgactagcgtttagttggctatcattaccaatgcttccccatgaggcacgtagtttcaaattatccatctgaggtaccaagtctttcataaattgctcttcagaaatacgccagccagcagatacggcagggaaaaatccccaacgtttatccggagccgtcttataagagccatcataacgaaaactgaactcagccatatatttacccgcatagacataattcaagcggcctactaaaccgccatatttatagaccgcagagtttccttcattatacatattatccacgtcacctctatctagctcaggtatagccgatgttgtcgaataataacgtctagccatgaaccagttcgtattcgtctctttccactcccataaagccaaagcttccacatcgtgcaaatcattgaatgtattcttgtagttcaatgagtattgctgggtagtcttataataaggttgagttttctccatcaactctcccttcgcaaccttcgttatcgggttatacgtatcttgaaccgaatcgtaggtatagaacgtacaggccgtcttcatctctttctgagccaagttggtataatcataggcgaagaaagcacgggcttttagtcctttaaagatctcataattcaaggctaattgaccgttaaactcgacattgcgcttatccttgaagcctgtagcgtcacgatcgagcatggctaccgggttcaattcattattgtccgaattatagtagtagtttttattattattggcatagacagggacattcggagcgttcgacttaatcgctgtaaataactcgataccttcatcgcccgtccaatacggatatttataatcatcgatatgaccgcctaggcccacttcagcgttcaatttactggtgatctcagccgtaatatttgagcggaaattatagcgcttaaactcttgggtagattttaagatactctcttgatccaaatatcctaacgagaagaaatagcggatcttctcagaacctccattgatattcaagttatgctgttgtttcggggcaaccttgcggaccgtttccgcataccagtcggtggacggataattgattgggtccgaacctgtacggtatttctcgacctcttcatccgtaaaacgcttggattgtccggcgttcatcaacgcttgattacggtaataggcatattcatacgcattcatcatctcaaggttctttaccggagattgcaaaccgatagaatagctatagttaattttagggcggctcatctcaccttttttcgtctcaataatgatgacaccattcacacctttgaaaccgtacacagcggcggaggcatctttcaagacgttcatagaagcgatctcattcggatcgatctgggtaaacggacgttccactccatccacaataactaacggctctccaaaaccacggatattaaatcgatccgagctatcgacacctggctcacccgtagactcttgatagcgtacacccgggatcttaccgatcaagtttgccttcatattcggttggctaacctttgccagttcctcgcccttcaaggaggcgacagctccggttaaggtcgctttcttttgcgtaccataaccgaccactacgacctcatccaatttttgagtatcttccgctaatttaatatcgacccgagtctgcccttttatagcgatctcttgagggcgatagccaatataagtaatttccagaatggcattgttaggcacttccaacaagaaattaccatccatatccgtaattgtaccgttggtggtacccttaacggatacgttcgctccgataactggcacccctagatcatctaccaccgtcccctgcactttccttgtttgctgggctacattcactcgcttttcagcggatagggcgatttggttgtttttaataacatacgatatacccatctgatcggcgatcaaattaagtacattctcgatatcgctatcttttacgtttaccgtaacccgtttctccatcggaatcgagttttcattataaaagaaacgataatcactgatcctttcgatctctttaataacttcacgaacaggttgttgtttcacagataaagttatctgcgcacaagtggcgtccgtataagcaaataggaagccacacaataagattgttcgtaccgtttgtttaattttacgcattttccacgtgtttttaatagtataatttacacaatatgatacgcttccactctttttcgcagagtggactattcacaaaaacatatcaaaagttaacgattgatttagctatataagcccgacatttgttatctcaagtccttcgtcataggcattactttttttcatcaataataatagtatctccttttgatgtatatataataggcgatgtcaaactgattagttcgataatattatccaagctattattggttatcactcccgtgaatcgtaatgctttaaccttctcactcttaaatactacttggatattatacatccggtttaacaatacggcgatctcgcttaaagcctcatcattaaaagccaactcattattccgccatagacaggccctatatgcgtcattcagtgtggattttttcagttgccccttgtttttcaagtaagtaaccgcttgatccggtaataagaacgcctcgtctcgtccgacactcgtttttacttttccttgaaacaaggtgaccacggcttgattatcttcttcgtaagcctttacattaaaagaagtgcctaacgcctctaccgctaaatcgcccgcttgtacgacaaaacgattgagactatctttcgctacctcaaaataagcctctccatccaaggatatgatgcgctccccatctccatataggtttgtgtacttgatttctgagtctgagttcagccaaaccttggaaccatccggtaagacaacgctcgctttctgtcctttagcagcaaagaccagatagtctttttccgcaccaaccgaccgtgaataccttgtcagcagatgtcctcccaaaccggcgcagatcaccaacaaaccaatagccgcataacgcatgatattccgaagagaaaaacgcccaacttccttcttctcgaccgctacgctctcaatacgactttgtattttccggaacattcgctccttcaaatccgtaggaatagaactattagacgcaatttcccatttccgctggatatagttccttaattcatcccgggaaacatcgctcttgaaccaatccaccagaatccgttcctcgtcatgagtagtctctcctttcaagaaacgttctaacaatatgatatattcactcttttccatacgctttacatgattatatactctttgcccgaagcgactacttacaagcaaagcgttttttttcgcatttaatattcattaacaacaaaagataagagccaaagcaagatcccttcttccgccaaatacttccttaaaaactgaagagagcggtaaatctgggcttcaacggttctttcggagatagacagacgttgtgcgatttccttcgtcgataagtgttctttacgactaagcaaaaagatttcccgacgggataccggtaatttatcgataagagaatcaatatattgtcctatcgaatttaccgtaatatcttcttcgacttttgaagtgtcccgttcatcccaatctgcttctaaggatttcatatatagctccgcatggaaaagggaatcccactcgtcatacactaaattacgggcaatcgtgaaaatataggaatcaaaattcttatctatatccagtgaatctctcttttcccagatcctaacgaagacttcctgcgtcaagtcctccgcctctaacctgttatacaataaggaatagataaaattatagatatgagcgctatacgattcatatacagactgaaacgccagcatatttccttcctgcagccgagagattatttcctttgttactttcatttctcagaatttgaaactctatccttatcataacatttacagatagttacagagaatatttcttacaaaaacgactagtttaaacgatcgtctaaatcaaccgttttttttaatattgaatatgcttcattatgaagagctaactacatgaaaagaaagaagataaatgaaagctttgaatattgtaggtcagagaaaaatatatatttttgtgacgaatctagacgatcgttttaatcattcattttcattgtatgataacaaaataagaggcttccctcaccactatgagacagcctcttacctctaggagaaataaatatattatctccgatctccctaccttacttttttaatcctgttgcttccaaccagacatttgccattaactgacggcccggtaaatcggggtgtacaccatccgctccccaataacgagctggagctaattttaacgcagcgtcgaatgccgcttggtagggaacaaatatcgcattaaactcatcggctagttttttcaacgatgccctgtaaccatcaaactccgggaaccatttggcatcatcaatggcggatccgccacgtaaagcgaaaggctctcctagcactagttggacattgggaagtttttccttcgtataatgtagcagatcttgtaaatccctttcataaatccctaatgatcctttataatttcccatcaatatatgccagaagtcatttactccaatcaagatacttagcacatccggctgaatagccaaggtatccagttcccaacgatctcgtaactgatataccttattgccccctacaccacggttatatatcttcaattgcttatctggataatcactcaataaggttgaggcggcaaataaggcatatcccatacccatttgctcgggtgtattacattggttacagtcatattttcgaaacatatccgttatcgaatcaccttgaaaaagaatcacactatccttttccaatttaatcttcggagatacatttccattttgtttactcactactgccttcgccaattccgacatggttaacattcctaagcccgcaaaagccccctttctcaaaaaatcccttcttgtgttcatcattctaaatattaagattcattcttcttaatatatacgactcattcactcaattcacttacagagacagtctttttctgcaaaaatgtccacaatttctagtgaatactagtgtttattcataataaaaaggtttcttttgtgtcgttactcgtttttcaggaatatataaggaagagtaacagaaaggccaaatacacttactatgggaggtgcatagcctaaccattattaaaccgggctttttttgtatatagaatttaacaataactaatatatatccaaaaccttaactatgacggtacctgttgttgattaaatgtttacggatcatccactaggttgaagatcgtattctcatcatacataacataagattcccagttcagttgcgccaaaacctcataacggaaagcggtaccgtcattaaaagtccgcaccaccaaattgatcttccgcaaaggcgcagctgctccctctaggggaatgagcacctcaacttgccatcaagcgaagcaagttgcacacttttacgagcaaacaacgataaactccctgcaatgaagaaaaagatcattgaatagattgttcattcttcatatattcatatgaaaattactcatacgctgaattttgttcccaattcgggttcgaacagaattatacataaacatacaatattcaccaagatcttcgggattcgcaaagaatcttcaaaaggacctgccccaaaaggagactaaaattacctttggagtaattcattttatgttatcatgaggtatcatcaattaaccaacgagtaaaattgcatcgaactgcgttatctcaccacaggaaactctgagatccttagagttgtacatccataagggactaagacgatctcttcttctggttgctcactcttacttgtggaaaatgggagaggaccggtcatctcattatatattctccaagaagtcatctctttcgcctttagcttgatctgtataggagcgtttctcacattccagaaataatcgcaagattgcttgtccgggtctattgtcacttgactatttttctccaagtcctcgattgtggcagataaaattccataattccattttgtaggggaagatacctcataataatcgaaaccaaactgatttctctcttttcctacaaattcctttttcatccatctctcctccatttttagcgcatagaccaggggaccgcgttctatcgctacagaattctcataccaccggctactctcaactttcataggtaaagatagtattacttgatcaccatctttccatggtcgatgtagaatcgccatatcgcttcctccatttattgaatcagtaatgccattaatcgtaacagcagcccctttacaccattcaggaatacgtaaatgaaacgggaacgtaacctcctttacggaatttgataatcggatcgtaaatcgaattttatcatccatcggataataagtatcctctattattgagatctcatgcccatcaccaacttgggctaccacctctgaaggagaataagccaacgccgcaatacccttatctggggtcgcataccacaggctttgggtaaatttaggccaagcttgatgcatattagaaaaacagcaaggataaccagtccgcgttccataaataatatccgttgccgcatgatgtgcatcttcatagaaattatgagggtgtcgtgtaatcatgatttgattggcctgctggaaatactgcttattcataaaatcatccgtaatctgtgtgggaagcgcattgaaagcgatgcgctccaaatgatcagtgaatgtcagatcacccgttatttccatcattttttccaaagagtacatcaactctaccgcagagcataattcggagccttgcgttggattatttccatgcaatccttcatctcctccaaacattccttgaggttgtccgttgtatttgcgaatatcagccaatcccttctttaccgcatctatatatgacttttccggcttctgctggtaatagataacaggttctttaagcccttgtgctaaatttacgcaatggatggaattaaagcgggttaaatgatccctatttagaaacatatcgataaaattaaaactttgctcatgcaacaaattccccaaatcgaggagaaatgcctcccccgtaatattatagagccaatagacagcctgcagattatcacaagcacggaattcggcccaaaaagtccaattccctagtggagtggaaggaagagttgccagttgataacggaaatacttcgtcataaaatcgatcactctctcatcccttgtcgctgaataatattgttgcataattttcaacatgaccatccttggccaccagtcggcagaattatccctctgcaaaccaggctctggactataatccttagatggaccaaagaaaccatcctcccgttgacttttcaatgtccactcaatccaaggctggatttttctctttagattatcatcatccagtatataggccaacggaagtaaaccatctatccaataagggcctctttcccattgatccccatcaccgcctagccatccattgcgttctcccattacctccggatacaatgtatccatctggctagaagccccgtctctctgtcgttccaacatttcaagaagccatcccttcgccttaatactccccaatggtaactccatataaggttttcgaatcagcggatagcgattatttaaataattggagttatctgccttaacgtcaaaacgtccacttaatattcccagaacgaataagaatgataaaaagatttttttgctcataatcgcactttttaataaggtattgataataaactaacaggtcctaataatcctgaaggttgcaatggagaatctacattccaagaattatgatgcgcccaagtcggacgtttttctggaggaaggcgaagatccccgatcaaacgattcatccatgtactggagacctctatctctagaacattttcccctcttttaaccatatctgtcacatcaatacgataaggagctgtccaaactccacccgcatatttaccattgacttttattttagccattgctataactttgcctaaatccaagaaaagccttttatctagctcctcttgaacttcaaatgatgttttgtatatggctgttcctgaaaaatattttatacggtcatcctcatgccttgtccaatctattaatttattaaatgcaacaggctcgacaggacctctcttatattgatcagactcaaaagtaacttgccatggcttatcaatttctacaatagtctcaggcttagggaaattagcttccaattcggtagacaaaggcttaccatgcctacgaaataccataaaacaactttggtatgcgtctaactttaaaggtacttgtgtaaattcttcattttctatgaaagaaggtaatgatcttgtcgaaccggtaaccgcatcccataattcagggactttacctttcacacggaattttggcaatgtgacgattgctttatcactttgattcgaaataaaataaatctcatttccgtcaacggtacgatgggtatagagtgcgggagaatcatcttcaaataaacaatccgggataatccctaaatcatcaaagacctcttttagttctacgttcgtaaaaatctttccacttccataagaacgttgttttacggaaagatcaccccacatctttttcgcaagttcattcacctctctatccgctatcgggtaattctccatactaggagaacaaacagggggatagccaagtattattgctccatcaaaaaccaatctttcaattttctttaaaacagaagggcgcatggttctcatcttaggtaataccaatacactataagatgtaccatggggcaatactagtttcccatccttgactgataaatcattaatcagcacctccgcatttatataatcataagaatatcccttcggtagctcaggatcacgcacacccgtcatctttggaacatcctctccgataaaaaaagcgacatccgcaatatttaagccctgctgtagcatataattagatcgtttaatataatccgtgaaaagatcaagatgagaataccacgtattcaaacgattaaattcattaccgaaactcgtattgacacccggtggacgattagcgtaaggttgatgaatgtaaacatgcaaaagtgtgttattaacaccttcggcaaacgaccaatcacctcgtttctttaacattgctgggtaacggctatatgaaccttccccacaggtaaatgattcagcagagactttcgactttccataaatgtgagcgcatgaagaagcagcccgattctctatacttcccaaagtaccttcgttccaaaactctcccccaacttcgtctgattgccctccatattgcaggaactctccgggaaatccccaatggccataattttccaaccaagttgtcattttatgtttatgacttatctctcttaaaccacctacatagtcataagcgattttatccgctattagtcgtcttacatcccatagaaacctatcagaaagatccggactgccaatggtgtgaccttgtagcacaggtaggaatggtgccggatcgtatccataatgttctctaaaattctcaataaaaccatcggtaaagttttgacctcctgtctcataactatcttggactacaaccttcaacgtttttcgatcggattctggtatacgctttaatatcattcctaagtaagaatcaaaatgacttgccacatgttccttattcattttatcgatctcaagtcctgttccttcagatgatgcaggtgcattcgttacacctgtaggtgtcattcccattcgcataatgatccattctccttttggcgcattccatgtcagcatacctttactatccatgtaatcagaaatatctaaaatctcattaggctgtaccacggaataatctacaacctcgggttgctcatcccacagataatcattccaataaggaagcggtgtctggtgcattttagccaatgttttttctgcgaatctttcgacaaagggtgtcgaagaaagtaaaatacgtttaataccacttcctttgttggccttcatcacaagccgaagttttttatccgttatttctggtaatcgtatagctacaggagcataaggatcaaaaccgacatttaatgccgcattcgtccgattcaacgtaaatttctttaagctcttgaatgagttttctattgatatctgtaattcaacagtcgcatttataggacgttcttccggatataagataagactccttgcaatcgttttttcagacaagggaatatctattatcacctcgtcttcattaaacgatattccttttccggcatctaaattcgtttttaagcgagccggaaataccgtataatttattttatccaacaaattatcataataatccttttttactggcatcgctataactttaacatcttgaaattcatttgaaggttgcgcaagatactcttgaactctgcacggtcctgttactcttttttctgaatgggcgagatatctcattgactgttctggcttcacccaaggccctccagattgactccaacccggactattaaaaagacctatttcaatatctaattctgtcgcagtctttaaagctgtatgtaaaatatcccaccattcatccgtgaaaattttcacgcttccataaggagcctcgttgggggataaacctatatttccaataaaagctctattgatccctttctccttcattgagtgaagatctttaattacagcctcctttgataaattgtcattaatccaataccaatatatagaagtctgtatatctgctgggacatttttaaaatatttctcaatcctattgaaatccgattcacttcctaaaagcattgaggaagtaaataaaaatgaataaataattaaaacaaaataatgcttataaaaatttcgtcgcataatctaactttaagatttacctgatttgcgattgagtaaactcaatcgcaaatcagcatttttcacttatcacctattataaaaatcgattttacgggagatagttggagcctaaatgttgtatacacgatattatcattacctatctcatacttaacaggtatttcctttcctaaatctcctgtataaggattccaaatttccaaagataactttcccttcaaacgcacatccgtctcaacaaaagagtctgtagagtttgcgaaaaaataaatatcctttccatctttttgcttatgaatataagaaaacattcctaatttttccgggggaaggcctcgatattcatctactcccaacaacggacgatgcaaagcatccagctggtcaagcgagcccaccgtatttatatgaacatccggacaaggcaataataaatcgatagcattagccagtagatctttttccgctgaaggaaggaatgccgctttacctcctcgctcgttcgatacagcaacaaactcatcaagacctggctctgaatatttctcaccaaatatctcttttataagttctaccaattctttatccctcccaaattccgctgatttctgagggaattgatgcgttattaaaagctttcctcccgtatcatagaaagtcttgatcttgtttagggtctccactgacaacacgtacgatgaaggtattattaacaatttatattcttggtgcgtaatcggagttgtcagacgaatctccccatcaacgatctgatatttatcctttaatagttcctcgggatgaataaatgtaaaatctttacgaatttgtcctgtcaacatatctcctatctggttgtaatctgtacccggaggcacatctttcccaatagtaggacgagttggattatcccactcataccatccttccaatgactcaatcgggtataaaatcgcgatatccactactcgattaccatcttgcaacaacgtagaagcacgcgccacataatcactataggaatgtagagccggtcccaataatttactttgatgccctattaatggaggaattttcaccatggttgggtcataccacatcccatgaggaacaaagaagttcgcccctcgaaccattaattccatcgctcctctatatagcataaaggaatccatatcagccctataattgccataaatctctacggcaacattgggacgattataggtatccgctgccgagcttatcagcttaaatcccgggcgcccgtacggataaccgtgaatagcatccatcaaagggaccgagacatagcgatagaatttaaacgggtcaccatacatgtcaactgctgtcggctcgtaatttccaggtggatgtcccatactcactaaatcgtgtcgttcactccattctcctacttttttaggataaccctcccccataagttcagcgcgcaatccataaagagccacacgagcagcctccgtttcttccccgatatggtaccataacgcaggataatataaaacagcttttttcttatatcgtttttcaaataaagcagtaagctccgcattccaatagcgagaattacctaagtaaccaacatcgtcaaaaaacgttcgcttaacgatttttccaaaaaactcattaaaacgagcactgtattgatcatacgtcattgatataaaatggtctacggcttctttatccatataatccaaacgagaatccacattgtattccaagaaaaatgacaaaagcttccatttacccttaggagcctgccatgtgagcaatccctcattatccacacattcggttaggtcgatccgttcaaaagtctccatattcatagcgaccgctcccataaaaaggtcttttacaggcagtttttccttgaccacccgcccacctaagatatcccactcttttttacttaaacgtttttgcgtatattgaggaaattcttgcttgagacgaccgcctaatacaccacttggaaaatccacatcgtcgtataaaataacctccgtgcctagctgctctgagcactctaaaatgtctcgataacgatcgaaataagattcactcaaatattcgggagtcgttccggggcaaatttccttgcctccccacatcttggcaggagttaatgacaatactgccacaccgccaaaaccatccttttggtacgcatctgtaatttgcctataaattccctctttcgttaattccccatttatatgccaaaaaggttgtggacgatattcattaggaggagatatgaatttagcctccatctcttttccctcattatggggtgtaccaaacgcacaccccgtaaacaaaagtagaccactgatagctatatttgctaaatttgtttgtttcattctacaacatattaataaccattattttgttctaagctttcattgctcttctgaatttccgaataatgaataggcaagacaaagaaagcatccttccattcatttttcctggaatctaaagataatacgtatcgttcataagagaatttcccttcaccatcttttatgatattaaggcctactattggcgtattatcagcgattttccacctgcgcaaatcgaagaaacgatgtccctcaaatgctaactcgatttgtcgctcgtgataaattcgcttcaataaggcctctccactatctgttatagaaggcatatttacgcttttacgagctcgaaccttattcacatattcccgagcgacatcctcatgtcctaattggaactctgcttctgcataattcaaatagatctcggctaaacggaagaaaggaaatggagttgtataatgatgggattgagatacaggttcgttctcgttcacgaacttcctacaatagtaaccagtcattgtcatatcttgctgaatcatatccgctccatccttaaatgtttcaacgatacgaccattcaagctggttgagccattgtaataaatacaatcataaaaacgcggatctctattctcatatggtttctccgggttataaatcgattttggatttatgtctccgctctcagaatttaacaccggtatctcgccgtctaaagtctcataagcgtcaaccagattttgagagggagtagcccatcctcggccaccatcacctgtacaggctaaattaaagcccagcatgtgagaatatgtctcactgaactctttagcaaagatatattcattgttggttacatcaaaaaacatttctcgataattgtcacataatgaatatcccttatctagtagctctttcgccgcatctgacgctttttgccatctttctttatcattgtccggattattcaaagcactcgcattataaagcaagactcttgactttaaagctctagcagcattagctccgactctatttctctcgcttggccgatctggcagattcgcaatcacatcatccaaatcactgataatgtattctacacactcattataggtatttcgtttgacattcgaccaatcactattaatatcataaacctcctttataataggaacaccgccataagaacggatcaaacgaaaatagatgaatgcacggataaacttcatctcatttatcatcgtattcttaaattcttcatccaccctggaggattcaatattctcaaagaacatatttaccttatgaagatacccatagccagtattccaatagtttaagacatcgctgaccgatcctacattatccgacgttaaaatattctccctgatataattacatccttcatcattatatttttgatagacctcgtcagagaaaaaagaataacggtaaaaattatcttgtcccacaagagcgttgtactgatcgttaacgtacatctttatcagattttgatcctgccagacaaccggatctgaataactgtcgcttggaattatatctaacgcattgcaagccgttagagcaaacatagccgaagctgcatatattattagatttttcatataattaatttatttaaaatgaaacatttacacctaaattaatcaaacgttgcggattcaaggcccaaccgccatacccggaacctgttgcctctgggtcaattcccatacctctcatatggtcgaaagaaaataaatttgtgccgctcaaataaacacgagcattcgcaacacctatcttctcccgaaccgcaacgggtaaagtatatccgatttccgcatttttcagtttgaaaaatgcggcgtttatatttgtgaatgtagtaccgttaattttattaggtgtacctaagcgaggcttcgtcccatccgtattttcaggagtccacatatcctccgtccaccattgcatgagatttcccgctccaccagacgaaggatcgacccatgtttcttgtatggtattaataactttcgcttgtccctgaaacaataaagaaagatcaaattgcttccaagtaatgcccaaattcacgccgtagacgatttgagggatatcggtcagatcttgacgtattctatccagcgagttgatctcaccgtctccgttggcgtcccatatcttgatatcaccggccatggttcccggtcgtttaggaacatttgaatccgccatgtcagactcgctataaataccgatcgctttataacgcaatgaacttccaatcggatgcccttccgccttttgatattcttccgccatcggtgcctcatccgagaacacaacattgtttttcgcataagtaaagttgccagaaatagaataagagaaatctttgttgaccgatttctggtgaccaatcatgaattctatgccttgattctctgctatacctatattctcgtcgggtaatgacaagcctgtaaaagccgggatagaagcatttcgcttagataatatatttgttcttcttgatttgaaccagtcaaactcgaaacttaattgtcccccgaagaaacgagactctataccaacatcataagaattcgagacttcccatgttatattaggattaggagctctcttttgggatagtccggaaacttgtgcgccattgaaaacagatccagcggtaagtccatataacaccatgtattgataggcatcaactacatcatttcccatttgtccccatgaggctcttatcttcaaattatccaaccagttaatatccgacatgaatgcttcgcgagaaatagtccagcccgccgacactcccgggaaaaagccatatcgatttcccttggggaagttttgagaaccgtcataacgaaactggaactgcaacatatacttattatcataatcatacatcgcacggccaaaatagtttatacgagctgtctctccccataaaccatcattcgtttgcgtattgctatcgccaaaaggcaattccggaaccactcccgaagcgaaattgcctctataacctttcaacatactactctttgccttgctctcctcaaagccaaaaaacgcatcaatcgtatggacctcattaaaagtgttatgatagttcgcacggacattccccgtcaaattctccgttcttttttcctcgaccgttaaagaagggctggagatagtcggcacgataatttttgagtactctcctgtcgcttgatcgtaattgtaaacataagctacattcttaaattgcttatacttctgctgataaaaatcataagcaaagctcccgactaaagacaaccccttgacccacgggatatcaatcgtgatattcgcttgtgagttgaagagccaacgatcggtctttgtctcaccggcttctcccgatgtttgtactaatggattatctccatcacgagcaggagcggccaaatctgtcccgggatatttcgctaaaattgtcggtaaattcaaagcgacatgagaatacatagatcctccattcacggagccatcacgaggaagcacacgacctagttttttcgcagataaatctaaactgatttttatatagtcatttactttcgcatccaaattagagcggacatttatttgtctattataagtgaatccattattaaaaggagttccttggttcaagaaacctccagacatgaaatactgtaccctctcgcttcccccacgcagagagagattggctttgtcctggtgagtccatgttttttgaacagttctgtaccagtccgtattcgggtaattcaaaggatctgacccatcggcaaacttccgtatctcttcctcggtataagtaggctctaatccctttgttatattggcccaatttcgtgcggtcgcataagttgcagcatcggccatctttacgattcgtgtaggttgggcaaatgaatggttgtaagaaacgtttatggtaggcttaagtcccgttttacctcgtttggtcgtgatcaagataacgccatttgcagctcttgatccataaatcgcagcagaagcgtctttcaatacggaaatcgactctatatcattgggatccatccttgacaagataccatcttcctccgttctcgcaataccatctactacatacaaaggctctgtattacttccatacgtactttttcctctgacaaaaatagaggtcccctcgtttccaacctcaccggaacgagtattgataattacaccagacaagcgaccggccaaacctgccgcaacatcggcggaagggcttacggcgatatcatccgctccaatcgaggtaatcgcagccgttaccacttctttcttttgtgttccataacctacgactacaacctcctccaacgcttgcgtatcctcattcaagacaatcttaaagtctgattgattattgacatgtatctctttatccttatatcctatataagataggacgagtaccgcattggacgatacgtcagaaatggagaagtgaccattgagatccgtaatcgtaccatttgtcgtacccttcacgactatgttcgctccaataatcgcatctccgttcacatctaagaccgagcccgtgatatttttcttgggtacttgttggtctgacacattgaccttcttcaatataatattcttcccttggatctcatacgtcaatccttgaccacgcaaaatttgttcgattaccgcattgatcgattgattttccgaagacacggatattttcttccctgtatccacgtccgcagacgagaatacaaacgagtagccactcctactcttcagctcatccatcgcttgttttactgttatattactcattttcaatgttatattctgagaactaacagttaaatttaagcaaaacgaagccatggccacataaatgaccttttttacaactttcataaatagcttaatttttagtaatttaacttgtgattgatgatgacctttcagaggattgattacatttgtattcctcatccagatcatttgcataatgtaatttgaggatttatgagtcggaggatctagcccattctccgattccttttatgatcctgttactccttttttaatctccttccatattctccatattaaaacaattttaaggttaaacaattatctatcacttcgcataaagcagaatactatcaccttccactttatatcttacttgatttgtcgcagttataatatctaacacattatagatagtctgttcttttctattgaataacgcataaaagcgattatgggttaactgttcatccgcaatatgaatcttcacattatagctacgattcagttctttcacaatgtcagatagaggcatctcatcgaagaatagtccatcgtttgtccattccttagcgtttttcacttccgctcggcttataatcatttccccggtaagtttattcaaggtaaccttctctgaaggagacaagtagtttattcccatcttctttacataattctctagctgaacttttccttccaacagattcacggttacctcttcgtcctcgtcataattccggaagttgaacttagtacccaatacttttacattcaactctttcgtcattacatcaaaaggtaacttctcatttttcctcacctcaaaataagcctctccattcagccgaagatggcggtctttcaccccaaaaccttgcgaatatacgatctttgagccagcgtttaaccagaccaatgtgctatccggtaaaatcagcttggtcttggcccctaaaggagcttccaccaagatatccgcaaactggttctgtaattgccgctcaccccaccaataggaaatcgtagaagcgatcaataataggataaccgctgccgcaccataaacgattttaggaatattgaaaaccatacggcgtttttgctgggtacgagaaacaaaacgatcgaacgccttatcgacattataggcacaggaatcatcggcaaccaaagcagagaaccaaagttcttgttcttcatgatcaggtaatgatcgctcgtttttcgtatgtgatttcttttcttccatatagattaaatatccagcttttatatataagacagttatttctcctcaaggggtagtgagaaacatcaattttttcatcctcacaaggagaaaaatgatatcaacaagatcagatacttcctcagatcttgatgtaggcgggttaaagccatctttatgtggtatttaaccgtattgacagaaattcctagctctgtagcgatttcctcatttttcttatgctcaaaacggcttttcctaaaaactcgtttacattcatcgcctaaactatcgattgattttatgatctccttctctaactcccgttcaagtaatatacctagcggctgttcatccgattgtatcatagcgtcccaccccaaggtctcagactcaatcttcgagaaacggacttccttcttttccttttctgatgagatatggttataacagcggttccgcacagcccgcattagataagcacgaagagagctatttatatccaatgtctcacggatttcccacagatgaaatatcacatcaccaactatagtctccgctagaaatgggtcgccaaccaactcattcgcaaattgacatagtaccacataatgacgatcatataaatatcgataagcatcttgctcgccatttcgtaatttttgcactattaaccgctccttaacatccatctcatcgcaaagatgagattttaaaatgaaaattaaaaatattatttctaattatacgatcttccatccacagctttttcatttaccgctccgtttaaatgaagcttcttgtagatttttatatgcgctctggttttctgtggaaggattcgggacaaacacgtacgactttcatccaaaacacgtacatgttttttcaaaaagtcgtacgtgttttggatgaaagatcatcgtgcttttttgaccctgatttttagcctcttatacacgaggctcattaatggtcttattgttcggaatttgtcttgagaacaatgctttccagcttaacccaaacggatgggttgccatttcatatacgtgccggtccgccataaccactccatcgggccgtagcccaagccggacagccaatattggctaaaggcaatctgtatggccgtaaatccaaggcagaccaatacactcaagaaaacacccaaatggctccaatccaagccaaaactggaaaagaattaattcacggtaagataagcaattatagtcccaacggccaaaatagcgccgatcgcggtctcataaggaatcagcctcaaccgctcgcgaatgcttatatccgctaccccaccggtagcgtggaagaacgatccatgcggcaaatgatcaagtacggtagcgccggaattaatcatggcggctccccaaacaccacttataccggcggcgataataatatccgcgaatgacgaagaggcaactgtcgctccggctgtagtagaggctgtagcggcagacatcaatacgccggaaaccggagccaataaaatctctcccatattcgtatgcgataacgcatctaataaaacatccttgatagaggaagccttgatcactcccgctatagtgcctgtcccgaccaacaggatcgagacattcgacatcttcttgagcccatacgagagacagtccgtaatcaatgaccatttcctcatcgccagaatcccaacgattcctccaacgggcaaggctatcatcggatcgatcgccacatggaataaagggcgaaacgacagcagtaggatcgtcactaccggagcaaccatgctagaggcgaaggaggggagagccgcttgcaggttatctatctcctcgttcgcataaaatccattttgccggggtaagaaacggcctatgacatataccgtaaacaacaatccaaccaacgccgggatcaagttcgcatacatgacagagtacaaatccgcatgaaaattctcaacggcgataatcgtattcggatttggagaaatgatattgccacattttcctccaccaatcatcatcaacaaaaggctaccccggggaaccgccagtttccggccgatactcaacgcaatcggagccaccgtaataacagcaacatcaataaacactccaatagccgtcagcaacatcgtagcgaaagcgagcgcaaaaaacacatgccgttctcccaatctataaatgatcgtattggagatagaagccgccgcacctgttttcaccaatatccccgacaatacccccgccgtcaagatccgaatgacagccggagttacgtcatttactccactgatcattaaagagaccgtttccggcaacgagactccccctaataatcctcctactaatgcccctaaaataaggctatagactggcgatacctttcttataatcaagaaaatcgacactaataatccgataaaagctccccatgcactcataatacccatgtattagtgattcatatagtattggattacacgcaattgttgttccaaggcacgcccaatattccggcaggtgaaatccttatccatcgcctgctccaaggaaaccggataaggaagaagtggcaagaccgccagaaacccggatttattaagcgcctctacctcctctacggaaccacccattacgataaccgggataccctgtctcatgcctgcctgcaatactccgcatggggtctttcccatgcaagtctgtttatccagtttaccttctcccgtaataattagatccgccccccgtatacattcatcaaaacgcaaggcatccagaaccatccggataccgggtttaagttcagcctttaggaaagcgacaaatcctccacctaaaccacctgcggctcccgcacccggaatgtcgtctatctctattcgtcccgttctttttatgacttccgcaaaatttcgcaagccctcatccagcaaacggaccatagcgtcgtccgctcccttttggcgggcaaagacatacgccgcccctttctcaccataaaaagggttattcacatcgcaggctatggtaaatgaagtttcccgcaattgcgataatgcccttgagcaatctatctcataaatctgattaaggatctgcccacccaatcccagctcattcccgtttctatcaagaaaacgaaaacccaaggcctgcaacataccggttcctccgtcattcgttgcgcttcctcctattcctatcaagaaatcccggcaaccacgatccatagcgtcttttatcaactctccggttccatacgtcgttgttctcaagggattacgctccgacacaggcactaacgtaagaccactcgccgtcgccatctcgataaccgccgtacgattatctcccagtatcccataagtggcctcgaccgatctcatcaacggatcatgtacgacacaagatacggcttctccacccatcgccgtaatcaaagtctccacggtaccttctcccccatccccaaccgggattttcacgacctcgcaatccggaaagaccttatggatcgccaactcggcacattcagccacttcaatagaagatactgagcctttaaatgaatcggaagcaacaacgatttttttcatttaatctcctttttacacatataataaaataaatcaattccttcaagatgtcccaatatatagattttaaatcaaatgaagtactacttacttgagtagagaagatatacttcattggcaaagtaagctatctcctgtgacaaaataagtatatctcctgcgacaaaaaaactaaaagtgacattttaatgcggttacccttcatagtctttcaagaatttgtctaatagtattcaaatttttatttttgcatttattataatacaattatacattatgaaacaaaaattgaacattactacattcttactgttttggtgcatcaccgctttatggtctatcccacgtcccgaatatccccgtccacaatttgaacgcatggattgggtaaatttgaacggagaatggacttgctcattcgatttcggaggtaccggaatggaacgggagttctataaatcgaacggttttgaccaaaagatcacagtgcctttctgcccggaaagtaagttatccggcgtaaaatacacggatttcattcaacatttctggtatcagcgtcctatcacgatcccacaagaatggaatggaaagaatataagacttaactttggagctgtttattataaatcggaaatatacattgatggagtcttagccaatcgccattttggcggaacctcttctttcgcagtagatatcacctccttggtaacaccaggaaagacacatagcctagtcgtatatgtagaaagtgacctacgaagcgcaaaacaaccggcaggaaaacaaaacctacaatttgaatcctacgcctgtaattatacccggaccacaggtatttggcaaacggtttggatggaggctgtccatccggaaggattgcaatccgtgcagttgctgacagatatagaccaacaacaattggttgtgcgtcctcgtttctataaagaactaggaggtaaattgcaagtaaccgtaaaagacaacggtaaaatagtagccagccaaaccattacggcaagctccttatcttctgctattctacccatcaagaaaatgaaaacatggagtccggaaaacccttttctgtacgacttggaatacaaagtaatagataagaacgggaaggtagtagatgaggtaagaagctatacaggtatgcgtaaggtacatatcgaaggcaataagatttatctgaacaacaaaccttattaccaacgcttggtacttgatcaaggattctatcccgatggaatttggacggctcctagcgacgaggcgttaaagcatgacatcgaactctccatggcggccggctttaatggtgcccgcctccatcagaaagtattcgaggaacgtttctattattgggcggataagatgggctatcttacatggggggaagcttccagttggggaatggattgcaatgatacggaaaccgcccggaatttcataactgaatggaccgaaatcgtagaacgtgaccgtaaccatccttcccttcttatctggacacctacaaacgaggagttctggcctgatcgcatacaatatccgcgcctgatgcacgacctgtataacctaacgaaaatgatagacccgacgcgtcctttccacggtaccagcggtggtgtacacatcgctaccgatatctggacaatccacaattacgagcaaaatccggaagaattgaaaaagcaactgtataatgacggtaaactatttgtcaccccaaaatgggaaatacaattgatgccgaaaaatatcggtttcaacggcctgaaatatacagaccaataccaattcccggaatataaaaaagatatgccttatttagttgatgagtttggcggtataaaatggaacccgtcacaacagatggaaagtacccaaaatacatcttggggatatggagagcccccccattctttagaagagttttacaaacgtttggagggccaagttaacgctgtcctatctctttcgaaggatatctggggatattgctatacacagttgactgatgtggaacaagagcaaaacggtatctattattatgaccgtacgccaaaattcgacatgaagcgtattcatgatatcttcagccaaaccccgaaggtagaataacatcatgatcttagtacgagggacagtcaatatgtaacaaccaaattttatcagggacatatccacatggatacgtcccttaatttttacagattacagattacatatttatctttatctcaaaaatttaataaataaaataaataaccttgataagtatctactttcgtttggttaattttgaatagcacaacattatttatcaacagattctcctcgaactccaccaccttctcaataatgacctgcggttccgtacaatctatgctctaagttttttcatattcatttgcaattatcaccagctcaaatattttaagacaaaagggaaaaatattagctctttacttacaaaataaaaaaacacggaactcatcaatgaatcccgtattctttaattatcaacattttagaggatatgctacttttttcttgtacatcttataacttcctgattgatgtacttaactttctccagatccatcttttccacctttcggtcataagtgaccaagccatttatctcatgttccacatctgtagtctgcgtatagatggccgtgcttagtccgaaatagtttatcatctgctctagctcggtaagcattaatacataggtatcggtcaggacctctctattcaacatcatctcataagcgtcattgcgtacaggccacatatgcccacgcacaaatagaccttttcctccgaattcaccaagggacgcagcacgtttatcatcgggacgggggatcgccttaggctcgatcttgccataatgatgcatatctacgaaatctccatttccggtatctccataagctttccgatagcccggagcgtaattatatcccgacataccgtttacccaacgattcggatcgtactttttcacccaagctgtgatgtctgtcgcttcaaaggctccccaattctcattaaacgggacccacatcacgatagaaggcgagctgacgtgttggtcaatcatcactttcaattcgtcacggaactgtttacgaaccgccactgaatcctcaccatcaggctcccaaagattcggcatatcttgccaaaccatcaagccaagcctgtcacaatgataataccaacgttgaggctctactttgatatgcttgcgtattacattaaaacccgcacgtttcgccagttctatatcatacaacaaagccttgtcggtaggagcagtaaatgcgccatcgggccaataaccttgatctaaaagaccgatatggaaaacaaactccccgttcaataaaggccgaagcacaccatctacctttcccatactaacagaacgcataccaaaataagaagatacctcatctattatctcaccctttcgatctttcaactgcaatttcaaaccatacaagaaaggatcatctggactccatagacggggttcccggataggcaagtaaaaactcatattggaatttccttcggttcttgccacctctgaagtaccattatccgcgatagccgttacctttaactccttatcctccgtataagcaattacttccaaccgattattttttaaatcgggcactagcttaatctgagaaatatattgtttctctaccggttcaagccaaacggtttgccagataccggaggtaaaaatataatctccacgtgagccgttcttgcccgaagcggcccggccgtcgttaggatcataagcacctaccacaaggacattttcaccggatttcaaataatcagtaatatttaaactaaaagcatcgtaccctcccgtatgggtacccaccttcttaccgttgacaaacacagacgagatccgatctacagccccaaaattcaacaatacattcctgcccttccatgcttgaggaacagagaagctacgcttataccacaggcaagtatcacccccacgagctataccggataattccgattccggaggatacggcacacgtatcttttctacttttgcgggaaagactggaggggtggttgccgtaacaggatcaagcaggtcttttcctcccatataatcccatataccattcagattcaaccattccgaacgcaccatctgcggacgtggatattccggtaaaggaatctcagccttcaatgcctcctctgtccatggggtaggcaatgtgaacttctctaggatttgcgcctttacggagaagagatctcccccaaaaagaaaggagcaaagagctaaacaaacaacggtaatctttttcataaaccaactatttaagtaattccggataatatttccggatcaaatcttgatcttctttctccaacttatcgatcaagaccggcttatcttgcggacggagggctttttgattgattttgttgatcaagctccaatccttagccggtttctccgggctgggatcggcaggttcatgggcttgcaaatcataacgggtaaagtcgatgacgtaagccggggaatttttcgtatgccaatcacgtaataaggccaagcggaattccttattcataaaccattttatctccaaattattataagagtctcccaaaccagagcctcgttctacgaagcgatagttccagtcgtcgttcgatttatattgttttctccaaagttcgccaaattctccgaacgtaacgaaatgagtatccggccagcgttccttggtacccgttacccacatcttcatggcatcacagatgagatccttcccgaactcatgtaccatctgcgcctcccagatattggcgacccagccaaagccattcaactcaagacctttatcaaagtgaatcgcttccgtgtgcatcacctcacgatgtcccaagtcgagcccccaacctttgtacgtctcgatcgggccgacacctctacggctgttgtatccatcgataccatgtccggtctgtccgctacggcgggcacagataaagtccatcgtccagccatccagattcacgcaatcgatgaaatcgctttttccctgcgccggcttgcaaaagtgttccgtcgagggatagaaaggataagaaggagaaccgtcagcaccaccaccgtctatattatgctggctccagatcacggcgtgcgccacatggatgttctctttctccgccaaatatctcaaattatcggccgataagaaacctcccataattgattgcggacgataaccatttcctaccattttagaaatgatctctatcgcctccgacatctcacggtttacccgctcacggggtagatacatcgccggaaaataaccggggaaataagtaacctcatccccatatttcttttggcactccactacgtaatcacggatctcccggtaattcttccgtccgtcctccaaggcattcatcgtgaatccccatgtaagacgaccgttcgggttattcatggcgaaggcctcccgcaaggcacgtactccctcaagcgtatgccaatccacctcatcgcggggatgtaacttgacatcccgggagacttcccaaggcgtcgtacgtatcatgatacataaggtgacaaaacgatttccttctatcgtcagcggttccatattcgccgggacgaccacaggatctgccgcccttaattgaaaaccactgagcacagcgaccatccatacgatcgcccattttctccaagctaatatattcatatcattatttctcatgtgtacaatttaatctcgtatttgtacaatctattactatttcctgatccgacggaagtatcctaaaggcataatccgaaccggattcaggtttccttatatggcctttctcgcaagtgatcacgtagttgaaaccatcgaagctagcgttgaccgccttatcctctataacggtgaaaggtagctccttccctgctgcgacctttagctctaaagcccatgagaggtccgcctcctttgacagagcggctacctcgaagcgggtctcatagaaagtgatcttgaatggatggccttttgagtcttcggcggaaactaccaaggtatccttgcctatctccgtcactaccggatgatccaaggtaagttcctccttatctccatccttgtctaatcggacgatccgaagcccggcacgatcgagtccctcgctccacatgaatccgtccacgacgggcaaggtatagaacaagaactggttcccgtctccgggcttttccagataagcggacttatagccttcgtcgaaaagatggatatccctaaagcggaaggttcccctttcccacaataagttcgcccgataataacggctgttaaaccagaccgtcttatttccttctccacggacatccgtcaacgtggtgacagccgtcggcggcgtaaccttgaagcattccttgaaccacgcaccggattcgcccagcgtctccacccggatcttattttccttcctcaaggagtccaagatagggatctgcatctccagtcccttgctcatattactccacgtgaaagagttctcctgtcccgcttgcgcataattgaaggccagacaaggctgatccacgatcgattccaagaaataatccacccagcggcgatccatgcccgccttctcatacacgggttccaaggagatcaccccttgacgctcttgtcccagaccatcatcatactgataaataggatcactgcccagcatacggaaaataggaacggggatttgcccctcctcggtctgcgccggcatataggcgtttacccggctcgggtaataggcttggttccagtaaccaccccatagggtataaccatccgtccccacttggtccttgcagttgcacgacgccacgatcttatatttatcgtacatataccccaaggtatgcgcatcgataaaccaagagccgatcgatttcgggtacgtgccgaatatctccttgaacttcgccatatagacatccaccagtcgctcccgttcttctttcgtatatccggtgctgaaagcgatattcgcgtgcgagacccaagaatgctcgccacgccacttgatcccggcggcctcgatctgcggttgcgtaagttcccaccaagcgccgatctcggaatgatcattgagtttacttttcaacagatcttggtacaatgggttgatcaacgcatcgtactgcaataagaaggttgccggtaaatcatatttattcaccaatttcacttgctcacaaaccgtctcgtacaataaactatcagcgttctccacccggtaatctgtctggcggatgaaattgatgatgttgataatacggggagcagccgcactctcaaccggtttctctcctgcgctacggcatcccgcacagcagaagacgataaagcatacaagacctatcttctttatgaatgacattcgattcaattttaaattcatttactctcataaaatattctagaaatggcatttcaccggtgtaaaatcatttttagaaatctaaaaggcatttcgcaagggtgcaaagccatttcttaaatctaaaaaggcattttacaccagcgcaaggccatttttaccggaatataaggcattaccctaccaccccgggttgttcggagccaagttcgggttcagatacaactcatccaacggaagggaataatagtaatgcttcggggtcacaaagttacgattctccgccggttccacaatcaagaaaccattttcgtctgtcaaaccgggatttccctcgttcaagacatccaagttctcgtattccgaacctttcagcttaataccttttatggcacctatcaattccgtctcagccgtcttccaacgtctcaaatcatccctgcggaagccttcgaacgctaactcgatcgtacgttcccgacggatctccgtccgcatatccaacccattgctcttcacgaaagcgttggtcaaaggaggcatctccacgcctttccgggaacggatcacattgatcgtcttgttcaagatgtcatcgctgatcgccccgtctttctcgtaagtggcctcagccaatatcagcaatacctccggataacggatgatgtgataatcatatacatccttgtcagaaggaacggaagtctccgccatatatttccacaacttataacccgtacgtgtctcgggacgtatggtaaattgcggcgggcaagtcaaggcgccgtcttgcggactgatatagtcggttccgggcatcaagaaggtctgtttcatacgagggtcacgattctcatattcgctcttgatcgtggcatatccctcaaatccggaattagcgttctcaatcggtaatcccgtactcttacacaaatacatatctgccagcttacgggtaggcgtccctcgccatccccaatatacagggcacgcgtcgctatggtggcggatatccgtctcgtaccgactgtcgaagataccctcttttgaattatcgcccgcattgataaacaagtagcggtagctctcctcaccggagccttcatataaagcatactcaccactatcgatcacttttgtagcggcatcgatcgcttgttgcaacaactgctgatagtccgaacggtgctggtgatacttcgcccacgtcccggcaaacaaggcaaccctcgctttcaacgccaaggcagcgccttgggttacacgtcccgcctcatccgagcttaactcactttgcaagggcaaggctgcgatcaccgcatctaactcagataaaataaaatcctctactttttcttgaggttctctccccccatacaattccggggaatcaatctcaagtaccttagtcaagataggaatattattaaacttcttcattaacctccaatgagtataagccctaaaaaaacgagcctctgccacatatctgcttatctcttttggatccttctcatacgaatcagcctttacaagaatcatattacactgacgcaaatcctcgaaacgatcgctccaatccccgtccgtattcggggcgattaacgtaccgttgctcgtcgtattctcgttcagctcataggcgatatcgctatccgtatccttggtgccgaacgtctcggtacgtgtgtagagccaattgacctctttctcgaaatcatccggggttttccagaatagctcgtccggcatattatcttttggcaacaggtctatatcttggcaacttgacaagaacaaagcggaaacaataaagcttcccaatattatccgatagtttttcatgacttttcgctttaatttttaaaatacgacatttataccaaatgaataattacgggtaaacggataggaagtaatgctaccgctgttctcctccgggtcccaaccatttggcgtgttatgtacctcaaataaatcctcgccggagaaatacacccgcaccttctgcaaaccggccttcgaggtcaaagtctgcgggatcgtataaccgaactgcaagtttttcaaacgggcatacgcaacgttaaacttcgtgttcgtagatacataatagttgtagtttcgtttatccttcaacgtgatcgccggatattgggcatccgttctttccggggtccaagtctttccataccaatactcggcggattgataccatgcctctggcatcgggcatcggctctccccttccaagaacatcgtcctacggcctactccttgtatgaaagcgctcaaatcgaatcccttccaagccatactcaggttaaagccgaaattataacgagggttcttgtcacccaagtatttcacgtcaccggagccttctttgccatcacctaatacggatagcttcccgtctccatccaagtccttgtacatagcgtcacctacgctcaagtcacccgggatacctccttccgagaaacgagatttatacgcctccaattcttgctcattctggatgattccatcaaattcatatccgaaataggaattcaacggatatccggtcggagtctcgttattacctaattggatcaggttacttccaacccgatccacgaccttgtttttcgcatcactgatattaaagcgaaccgagtagctgaaatccttgatctgatccctccagcctagagagatttcccatccatgaatacttaaatggccgctgttcgtgctcggagcgtccgcacctaacatagaaggataggtcttcgggataagcatgttcttattctctttccagaagtagtcgaacgatccatataaacggttattgagcgtcgagaaatcaaatcccacattggttgtctggatcgtctcccatgtacgagaggtagaaataatatttccagacgtagccatttgtcctttcacgccagtcccgaaaggataataatcgttcgataaagagattaattgaatataatcatacaatccgataccggactgattacccatctctccgtaagaagctcttaccttcaagtcctcgaaccaacctaaccgtttcatgaaaccctcttctccgacacgccaagccgcgtttacacccgggaaccatccccaacggtgatccggatcaaagcgggaactaccatccgcacggatcgttccttcgatgacatatttattggcaaacgtataattcactctggaaaagaaagaattaatcgtccactgatttccctcgctccaagcgttttgatcttgggcgctacccaattgcaaagacatattttcttgttggtcgaagttaatacgcttcgccgtgaaccgatcatagttctcagactcatgggaagtaccgaccatcacgcttaaatcatgccggtcattgaagttctttttataatcagcatagagcgtgaagttcttggataaagttttctggtaacgacgctccgcactattcggcgtacgtttctcccgaacctcgttattatcccaatcgtaattgatgattttcttgttcgtcacgttctcatcctgatcatacttgcggatcacggcttgtcccaccaattgcaatccgtcgatcaccttccagcgtaattggttgttgaccgttatattacctgtagtcttattcaccatgcctccctcttccaatacttgggccggattatcaaatccctcgaatgtatagaaagttcctgacggattgtacatcggagtccaagagcgagtcttataaatcagctcccatatattttgtccttccgtcaaacccgaggaatagtccctgttgcttgcctcataagctaaattaagatcgtaagtcaagttcttgaagatctcgacgctcgatttagcacgtacgaagtaacgcttgttcacatcctcaccaaatttagggataccttcctcacgctgatggcctaaagacaacatatacgagtatctctctccaccaccggagatattgacattgtagttctgcatattgccattgccaataagcatatcattccagtcttgatccttgaagaattgcggataaccggtccaacgcccccattccgcatcgggcaataccagatcactattctgccggatcaattccaattggtctctcgtgtattctggagtgaatgatccatccgtgatctccaaggccatctccgcatgttgtaatagattcgcaggtttccttaacaacgcaggagtcttaatagagtaatatgcatcaaaagcaacagatgtcttctgattgcgcttaccacttttcgttgtcaccagaataacaccatccgaggcacgagcaccgtaaatagcggccgtaccatctttcaatacggaaatattctcgatatcggaagggttgatcatattaatatttccctccgctccatcaatcaaaacaaggggagtaccaccgttgatagaagagacatcacgaaccttcatggtcatgtccgaacccggagcgcctccggtacgtgtaatcgtcaagccaggtacttctccctgcaaagcctgagccgcattctgaaccggacgagactcaaacgcttttgcgtcggccgtagatacggcaccacccaagttcgctctttttaccgtaccataaccgacaactacaacctcatccatttgcaaagcatcttcccgtaacttcacgttcaaattcgcttccttgccgggacgcaattccgtcatggcatatccgatgtaagagatttgaaggacaccgttttccgatacctctatcgtaaactttccatcaaggtccgtaaccgttccgttggtagtacctttctcaactacgttcgcaccgataataggttctccattctcgtcggtcactacaccttgcactaaattcttcttttgcaaaacggcttgtgaggaaggggcagttttctcgttttttgtagagggattaatcaagatgaaattattctccgtaatctcatactttacgccttcccctgcaaaaagacgcttcaaaatggtttccaccgtctgctctttcacatgtacagatacttttttattcaggttaaccttctcgctctcgtagataaaacggaagccagactgtttctctatcctgaaaagaacctcttttattgtctggttattaacgtccaaagacaactttgtctcttgcgaatagacagaggccgagatctgaagtgaacatgcgatagagaataatgtcgtcaatctcataatagacaaagtttttttaaggaccggagactcttccggccttgctatattccaaaaattcatatatttgtaattcgattgtttgttaacactagtgttacgagcactaattttaatgatcaaaaagatgacggggaatgttccagcatttcccgtttttcatgtgtattcatgcgattcttgttctttacttcataggcagactttatttagaggttatacttatattttttcctttcacgttataacttatatcactcaatcgggatagtacacccaatatatccgttatggtttcctcctgtatgactccatcgtaatgtatgctattccccaaatccttttgaagatggatggttacatcgtacctcctctccagatatttacagacggaagctagcggcatatgatccatatagagtttatcttccagccaactgtacgaatgagataacacgcccgataccggtctcatccggttggtttgcttatcgaaaaccgccatgtctccggcgttcattagtaatttctcattcccatgatccagctcgatacaaccttccaccaacgaggcttcaactgttttttcatccgtgtacgcttgcaaattaaaagaagtaccatgtacctttaagcgcaatccattgttcatcttgatcacgaacggtatcttgttcttcgagacatcgaagaagccctctccttggaaattcacttcccggatcttctccttcgcgttataggaatacgtaatatcagatccagaattcagcttaacaacggaaccatccggcaagaccacctccgatcggcttccgtaatcagcggtcattcgaaccaacatttccggctgtttatcaaatactcccattttcgaaaaaccaaggacaagcaataaagtagctgccactcctgaaataatatatccgatattcaccaagcgtttccgcttattatatctcttcttattgatacgatcgatcttatcccatgcgtattgagcattaaaagtttcttgctccagataagagcctgtttctttccagatctctttataccgtttaaaatcttcttgattagactcatcctcagccaaccattcatccagaaccggatccacgatctcctcattcatcctctccgataaatggtcaacgatgtgttctcctatttgctttttcttctccatgagtctagtctttatttaaatgacaccacaaataaaaaaaggtcctatacgaaccttgaaaattttctcattattctatacctccttcatctccagacattccttcaacttctgtaaagacatccatatttgatttttaattgttttcacggatatagatagtttctccgatatttctttctgcttcaacccttttaccctgtgaagaagtaacacttctctactccgacccggcaaatggtctatacaatcataaagagcgatcctaaactcttctgtttccagttgattatcctcataggatagaagtaataagtcttgattctctgataaacttcccgtctgcacctttgatcggataaagttcaaggccagatgtttagccatccgatataaatatcctgatacattttcctttatctctattctccccctatttttccataaattcaagaaaagctcttgaacaacatcctccgcatcatttctatccatcaatagactatacacatactgacaaagacgcccgtaataacgatcaaacagtttattataactgatataatcattatttccgatcgctagcattaagaccttatcggcatgaacttcctgcatataatcttcatttatcatgaatattcacaatcgtctttacaggtaaaagagtttcggcaagactatggctaacaaaaagaagaacgaagatataaagcgaacaaattcagtttgtaaccgaagtttaaaaagatgcttagtaaagagatctgagatttcaggaaaaggagaactggattataaatatatgtggtagaataatttacagtttatcaacaaaaccatagtcttgccgagactcagttgaaatagatctcagaaggatattttacaagaaattaatcctgcctttccacaaatctcctgtgacgcaaaagtaggaaaattattatttgattgattattttatcattcttttcatataagatcatcttcccttttactccccagcaaataaaaagggaaatatctcacgacacttcccttttaccatgaatcttatgtttgaattattttacttctactacaatcatcacagggaaatgatcagatggaacacgagctacatgtttttgcatggagacctccttcggaaaattcgcattttgctcattcttcgcatctttcgcttccgaacgatatgtatccgtcaagacaccatattttttcacatcaaactctttcgtaaggaataaatgatcgatacgactgtctgttttgcgatccgcatggaaggcattaaacgtgccgttgggtacataccggaaatccgctatctgataagaatcccgcataataccggaattgtccagtaataagtaggattcattatgttgatccacattaaaatcacctgttagaatcgccggtagcttctccggaaattctttcaacttcttaaggataagttttgcgctttccgcacgggcctgtacaccaatatgatccatatgtaagttaaagaacaagaaagtaaagccggtttgtttatcccgaaatttaccccatgtgcaaatacggggaagaacggcatcccatcccttattagggcgatcggttatcgtagacaaccaaaagtccccatgatcgagcacctcgaactttcccgtacgataaaatatggcagaatattcaccagcttgcttaccatcatcacgtcctaccccgatataatcataaccgggcatcgcattctttagatcttgcaactgatgatatttaccttcttgagtcccaaagatatcaaaaccatggaactgcaccaattgggcaatgtagggataacgttgtccccagccattcccattcgtcgagtctcccgcattcgcattacgcaaattataggtggctactaccattgactccgcttgtaacgcaaatacggaacaaaggacaaataaaaaagaataaattagcttcttcataccttttatcataaaattaaatccacatcaataaattagaactctgcctctatcattatcgggaaatgatccgaagagaaatgcccatactggcactcgttcaaagtcccatatttatttacctgaatacctttagtgacgaaaatatagtcaatccggtttttcatcggggcattcaaattgaattggtttgtcgttcctaccgtcccatagggtggtgtttttgagatttcccgtgagtccaacagtaaaccatcggatttcagtatttgtataggctcagaatccggcgtaccattgaaatcacctacacagatagcaggggaatcccccgctatctttttaatattagccaacattatcaaagcagactcatgacgtgccaccttaccgatatggtcaaaatgaacgctgaagaaataaaattcctttcccgaaaccttatccttcaacttcgcccaagaacaaaccctccggcattgcgcatcccagccaaaagaaggcttatcctgtgtctccgacagccagtaatttcccgagtccaataatttaaaccgatctttcttaaataaaaccgcggcatgttccccagcctcttttccgtcatcccggcctacgccgacatacgtgtacgtatcatctttcactaattccttcacttggtgaatcaacccttcttgaatcccaaagacatcaaaatcatggaaatgaaccaaagataccgccatgtctttgcggtgtacccatgaatcatccttatccccctcattatcataccgcaggttaaaactacccacgttcagtttacacttctgttgtccggatatccctatgcagaaagtaaataaagagataaacactataattaagtttctcatgatacccccttgattaccagcccggattctggcttagattcgtattgaactgaattactacctccggtatcggatataagtactgacgagccggccagctacgtccggcgtaattatactccatcaaataacctccttgaaccggcttcacgttaagcacattactcttatttgtacccacatagacaccaatcgcagcatacttctcatcagcgatcttatccgtatcatagaaataggcatcataattaccatcgccattcacatccaacggttggttaagtgatgggataaagataccttcccaaggatcgttcacccaaagatcgcaacaattccaacgtttcaaatcatttaggcgcaaaccttccagacaaagttcaataccacgttcgcgacggatctccaacaaggaaggatcagagatcgtcgggtaataagaagcgatataaggctctgcggatgacggacgggttgtcaatgtacctgtctgtggtgtgcctcccgtaattcccgcacgagaacgaagcgcacctatcgtagccgcccaatccgcatcagtcagttcgcctaattcagccttagcctcagcatagttcaacaaaacctcagcatagcgcatgataggaatgtcattatcattcgtagccgcatcatcgtaagccacgtcatccatggcaaacttcgtaaactgatatcccgtcaatgtatgtcccgtaaaattagccgcggtcggctcataaacaccagaagcattcttacgggtataatccgctccccggatcgtctggttcaagcgggtatcacgtcctgttgtctcctccacgaaattcttatagcttccatccgcttttttctcgacataaggcgtaccatccgcattcaagtatgacagcataaatttacggctcatgcataagtgtggtccgtaagtagaggaattataccaccaattctgctcacccagtcctaacaccttgtcagtctcgatagccatcattacctccgtggtaacggccttatcggcaatgaaaagttcgcgatacgctccacggccatcgctataagcacccgaagtataaagtttgtacggtccgttatccataacttccttagccgcctcagccgctagtttatataaatctttggccgaatattccgtacatcccgtacgagcgatatccaattggtcagcggcatggtatttacgccaagcagcctcaaacaagcaaacacgagatttgaaagcggcagctgtccatttatttacgatcgttgaattatgcgtgacatcctcttccaatatattcgtatacgcataatccaaatcctccaagatatgcccgataatcacatcacgtgtatcacgcgggttataaagatccgggtcttcagcctcgttaaataccttatcaatccaaggtacctcgccatattgtaccaatttatcaaaatagaagcgagcacggaacaagcgtgcgataccattataattgtcacggatagtcgtgcttagtgactcattcacgttattctccaaaaagaaatttatattacgaagagcggaccatgaccaactcgtcgcgctattcgtagtataagcgccaacctccataccacccaaggaatttttcaccccataatctgccgtagcatcacgccggaaagcgcttcctcgggaaggcaagacattgtaaaatgagtacgtatacgtcttcaaaccattctcggagctaaacaccatatccacagaagcctccgactttggttcctcattcatctcgcaccccgaaaatacagccaaaagtgccaccagaccgcttaatagtatattctttttcatttcgtataatctcctattctttaaaatgtaacattcaggccgatgctgaacgacttcatcatcgggtaattatatccatcaccactattgctggaggtcaagtccttatccgattcaccgatattcgatacattgacatccttggaatacttgtaaagcggagaccatgtaaagagattttccccggaaaggtaaattcccacatttgtcaaatgcaattttttaatccattccgacggtaaattatagccaacctgtatgttcttcaagcgtagataggccgcattcatcaaatagcgcgtgttagcgttcttatgacctccatagaaaggcgcatagtaaccagcgtaacgaggcaagaatgcatccgggttctcaggagtccaatagtttcccacatgccaagaaggcatctggttatacgggcgattgtattgcccccagaacgtagaggcttcattagacggataccaatcctgcttacccactccttggaagaaagcactcacccagatattgttccaatcggcagaaagcgtaaagctataaatataacgaggctcctcgttaccgatgatcttacggtcgcccggatcatctaccgtattctgtccacgatcaatataaccgttgccatttaagtcttcaaacttaatatcacccggatacaacttataggttttcgatgtttgcatgagcggattataataggattgtcccgcagctttcgcggcagcctcagccgcatcgatactggcttggtcctgccacaaaccattggatacaaatccccaaatctcaccgatacgcatcccctcataataattcttgtcgagtgattgattcgcatactcgctcaatgacttattcgcattattaaacctatcgatcactgaatagtaatctgccaatgtacccttgatgctataattaaatcgcttaccagctaaatcaaatccatctctccattccaaagacaactcatagccataagtagacatatccgcataattacctttcggagaagaagcaccgaacacatccggcacggtcggaccattcacgatcatatcagttgttttacggatataataatctccacttacggtcaaacgattatcaaagaatcctaaatccgctcctatatcatacgtcgtagcggtttcccacgtcaagttgccgggaagagccgccggagatgacatataattctgccgcaaaccgtcaagaatataatcagacttgctgatacccaatgtctggatatactgataattactcaatccggccgcattgcccaaagagccccaagaaaaccggaccttagcgttagagatatgttcggacttaacattccaccaaggttcttgcgagattcgccaacccacggaagccgaggggaagaaagcccaacgctcatcactcgggaagcgggaggaaccatcgtaacgtccgtttacctccaacagataacgatcatcaaaggcataattcaaacggaagaaagcgccgccaaactgataagccttccattgtgaggtaatactccggttatcagtacccatcaccaaattcatgttgtccacgtcgtccgtcaacaagtcatcattataagcatagatgcgtttgaaagtagatttttcgtaattccatccagccatggccttgaaataatgtttctcggcaaaagtttcctcaaactctgcgaaaaggttcgttgctagatagttcgtatgatcagttgtctctgccaaattggaataggtacccgtaatatgttcgatctggctttccccatctgcatcaaccgaccgtgcatacggtgaacgtacttgtttcttggtcttctcttgcgtcttctgttgatacgtgaaatcaccattcacacgcaaacggtcacccaagaacttagcattgaatgtcgtagtattctttaagttggagttctttgtcgtaataccgctacgtccataaagcaaatcgcctacggtatagacggcagaataagtcatcgtaccatcagggttgaacagtggcgatgacgggtgtccctcgtctgcgatatttctccataccacaccagaaccttccgaataggtaatcggattgtagtatttattatgggaaaactcaaagttattgttgatcttcaaccaaggagttaactgataacctcccttgaaacgcatgttataggtcttgaacttatccgtttgctcatcgctatcgaaaagtccatcgtaactatagaaacgtcctgacaaataataatcaaacttcccgtcggaacccgagatggaaagattttgattctgcgcgaagacactcttcttatacatcagatcataatagtcggttccttccggataatacacataacggccttttgtaccgatagagccatcagagatcaccgtcccgaaatcgcccgtctcatgacggcgcttatactcatccagccaagccacggaaaattgctgtgtcttgttgataccggaaggattcgcttgattgtaattaaaataagcgtcataaaaatgctttgcccaaatataaccatcggaaactacatccggcacattctgtggtgattgtaatgaatagctagaagaccatgtcaccttcggcttaccttccgtagcgttcttcgtcgtgatcaaaaccacgccaaatggagcacgtgcgccataaatagcggaagcggcagcatccttcaatacggaaatactctcaatatcattcggatttaacatagaagggtctccttccacaccatcaatcaacaccaaagcactacccccattgatagaaccggcgccacgtacgttaaaatccgccgtacgccccggtttaccatcagacaaggaaatattcaagttcgggacaaccccttctagcatctgagtagcgttagccgtaggacgcccctcgaatacatcactagtcacttgctctaccgcaccggtcaaattcacttttttctgggaaccataacccaccacgactacctcatccagcttctgcgtgtcctcatgaatagatataaccaaattatctttattgcctaccggaacatcttgagccacataaccaatataagaaacctgaagtatcgcattcggagttacctcaatagagaaatgaccatctatatccgtgatggtaccattggtagatcctttcacgaccacattcgccccgatgattggttcccctttcgggtctgtaatcgtaccggtaactttcttattaccttgttgctgaacagtttttaccgatgataaaacgatctgatgacccgatttcaatacataagccacattcgcttgctttgctatcgcatccattacagcattaatatccgcatcttccacgtcaacagaaatcggagaattcagacctttgatcccatcattatagaaaaaacgatattcagtcgtttcctctaattctttaataacctcccgcatcggtctatcctttaccgacaacgatatctgggcggcaatcgcaactccggaaaagcccgacaataactgggcatacaaaagtgtccggaaaaaagagtgcttgaaattactcatttttaaaagttttttaataatacatagattttaaacaggtaactttacaagcaaatcatttacatattctatcttatttataaccggctagttatttccttgaagatattatatacaagtgattttgcttaagaggaagaagggccttgcctttcttctttttttactacaatcatctagctcatctcataggcttcttctttattaggttaacactcaactttctatttctcatttaaataaatagtatcacctaccgacacatacgtaatcggagccgtaaggcttattatttcaaatacattatccagactattattccggatcacccccgagaaactgtagcctttaatcttattggacaaaaaacgaacttcaacattatacattcgattcaacaataccgcgatctcctccaacgactcgccagagaaggccagttcattcgtacgccaaagacgggcataagaagcatttgtcgggtgattaacagataatatatgactagacttattaaaaaccgcactctcatccggagacagaatcacaaactcttttccaaccactgttcgtacactgccttcaaacaaggtcgtaaccacctcgtcatcttcctcatacgccttcacattaaaagctgtgcctagcgcctcgacttccatatcccccgcatttaccaagaaacggcgcaatgtatctttcgaaacttcaaaataagcctcaccagataaagaaactgatctttctttcacgccataatcactcttataattaagtttagtatgcgaatttaaccatactttcgtcccatcaggcagaaccacgctagcacgttgcccattatctgctgacaccacataatccaatggatcggataatggaacctgtctcatataataccaatgtgaaccaattccaaggcttatacatacgaatgccaccgccgcataagaaagccacttccataaggtatgcggtttcttctttatctccaaagttttcttctcttgtcttatccgctttttaatctcacagaacatctgtccttgtagcttaggaggaagctttttcccggaagattcttcccatctagacatataaaaagccatgatctcttccttatgatcggaatcgctaaaccacgccaaaagagttcgctcttcttccggtgaagtcttgccactcataaagcgatctaataattcgatatgtgtatacgtttttctcatcgtgtaataagtatatcccgaagaagagctttacccttacacggaaaaatcaaaaaagccttgatttaacacaaattaataccacacttgttttccgccttcataagtaaacgggcgatgttcttttcctcgtgtatggttatgaatacgaaaaatagattcccgtggaatattttgatatattaatttattgtcttcggcatactgtttacctaatgatatccactttttttcccaatagaagagttcatataattctcccgttacgatcttattatcatcattcctcggataaaattccaccttcgctatctgtttaggttcgcctagatctaaaacaacaaattgatctttttgaaattgatctggttgataataagacactcggtcctgatctgtcaccaaatcgagaccatgtcctttagtcccttcatttccaccccactctccggaaaactgctggccatcgcttccaaatacttttatttccgctatagcgtaaaaatagcccaatggctgtgtttcttgaaaatcacagatcaaataacgatatttttgggaaacagatatacggaaactatccacataaaagggaggattttcaatagaatatatcaaagaacgatccgaaagatctttcttgttacaaacataaaagcgggttcctatcgttcctgtggcttgaagcgccgtattcattcgatatggagcttttgaatagaatgtagcagaactttccattctttcaaaacccggcaataacttacgtaagtttccttcactagtcaagatgaacgcatctcccgccggttgtatacttccattattataataagcgggaaggtagagcatattgacacccatcttagggaagtatgcctttgtcccttcagcccggctccaacataccggattccaaccaataacatcgtagcaacataaataaacatattctttaggatgtttttctttccaaagcggaacctctatatccttacatacgacatactggtcagtgatatcctcaagtcccggatttttaaataaagcaggtatttcctcttttgacaagatagctagagagtgaagctgtatccgatagttataccgataaactttaggagcagtcctacaatattggacagtgatagcagacggaaacatatcaattttagattgatagacatctctccaaaacatcccgtctatcttaatgtcatccttggtaaggaaaggtctttgtgtattatcatatatcatgccggattgcttactccctataatctcgacccatgaatgaggatattgtgaatttccccaacagggaaccatatttaatgcggcaggtataccattcgccctcaatgcagcaattttatatgtagacttttctaaacaagttcccatttgagtggctactatattttggaaagtcatggggcgcaatccttgatatttaccagtaaagattatccattcattgagaaagccctgctctacgtcatccgatatagctttaccaatctcttcatacgaacacatatacatagaatctcgtagtgaagcatattttcgatcaaaataactcccagcatgttcccaatgacaattatctgtagtgtaaggaagtacataatcaaagaaaatatcccagtccatattcttacaccaaggatatcgctctttattttgaaaacactgatctatatgatgtataagataatcagaagacaattctttcaaatcagataaaaagcgaggatttacttttgtataaggatacaatttgtttatactatcatatatagcgtattggatatcatataaaaagggaccgtatgtcgctctataattagcgaaagcatcgaaatatacctggttccctttcaccgagttactatctaatacttgctttcctatcatattacttattagaaagcgggctgcttcctctttcttctgattatccttataatgatgcagaacagcttctaactccgatctattttccccggatttatccaacgctaattccaataaaacattttcattcgaagaacaagcacaaaaagttaaaacaacaaagaaaaaaaagtatcctactatcatagctaaaatgcttttttactaccatgtaaatgtaacctttgatagatcaaaagaatacagatgataatcatcatcccagcccaaggctattagttctttatcatcgtttgtcacacaaatattgaatagtcttatatcagtaactaatcgacaaatacattttccactccaatcatatactaaaatgtcattacttaacatagtatctaacatgcccgcattagtatgctgatccaactttttccctgaatataaggtgtaaatataatgatcagtcgcatatatatccgtataaccaataacattctctttgccatgttttatgccgttcctgccagatctactatcatcaatgtatataggataaatatcgtgataacgttttatgagcattggaatcgtatctatctgatatagttcaaagatagcgccagatgccgcgactgtagccaatctatctaatactggattataaaccatatagccttgataggcaaatgttttacttttacctccactattgttcccatcatttggaaaatcgccaaaagacttcacatatttacctgcacaatcaaacaaagcatatctcttagcatttgtttcctctttatcaaggagtccagaaacgacatacccatgctttgtttgaatagcagagagaaacatatattccaaattcacaatagaagaaatacttttagataaacttttggttacaatttgtttcttttgtatatccaatataatcacatttgattcatctttcttttgcatcaaacgaggcatgatgttttcatctgggccttctcccgtttgggcaaaagatagaatactgtcttttgtataatatattttatccaaaagagattcacctaaataattctcttttattagacatttctcactctcaaatagtatcatcctaccaaacgaacttaacttataagtatccgcattgagttgatttgcttttatattaacgacttgttgaaagtactctttgggatctatttcgttctgttgacaagagacaaagtgtataaaaataaaaattataattaatatatatttcttcatattgttcttttcaaacagctgaatcattatacttctctttgcttttacatagcctaaatagtctaaatatcagtttatcatcatcataatttgtgtttttataatgattttcagaaatatacaatcctttttcatcaatatacatcagatttggattatatgtatattcaggaaaaacagtctcacctattatattaaagtttttatctagaattataatagaaaatatctttcttccaaaatcccacaattccatatagttttctctattatctatctctgttttcaaatagcaaactctataatacacattacggtatttatcatataacaagttaccataatttggattttcacacatagattttaatgttccattataatcattcggcatcacaaccctatcaatataattactttttacattcactcttttaacaatattgtgatctatagaagttataaatatatcttcttcatagaaaaaagaatagataaatttatcaccattaaaacatctactaaaatacaattctacaccagcattcttttttttattatctgcaccattaaatcggggatattcaaatggaagttcttgtacatcccctgtatttagatcaatcattgcagatacagggttgggatatttccatcgattacactccgataatacaaacagattattattaaatttaagtatagggtgataactaaacgacaaagagttacatgcgtttaaaacatttccatcttttgattttccataataaatttttttatttatttttccatctttatttacactatatatttctggaagctgtaaactcgtcagataaatactatctagactgtcaatataataccctaagaaaaaaccaactccattatctccctctatatcaagatctattttgaaggccatttcttttgtctgtatatcataaaaaacaatctgatttttgaaaccattttgaaaactaatatattgatgtccatctttatctgtataaggaaatagagctttaatatatggttctacatcataattcaaatcaaatgttatattactatccttttccaagtaatacatataatttattttttcacaagacaaaagagcaattaagcttgataatattattagcaaattatatcttttcattttataagtatttgagataagtttcaatcgtaagaattaggttctacaacgaattatagatcaaaacaaagttatttttattacatatttcactacaaaaacattatagaaccataaaattaatcacatggagcacaaccgatagacccactattacaacaaactcttgtatctaagttcaaccagcaactccaatgagtagtacattcttcacccgcaagagcttctatattgcttaaagctaatccagacaaagaaggatcaatattattttttagaatattaatcatcaccaaacagaaaacaataacaataagaataactcttaatttcttcataacactcataatataattatttataagatctttatgtttcgcctaaccctctttagttagaataagatatcctctgtatcttttttacatttaaataaattttagactttcacatcacctcctttctgataatattagggagcgaataacttgctgtgatagtttctaagatatcaggcaaatttcccttttataatttgactttatcaaatcgtctttccccgtatattgagtttaattaattgatttgtattacattttactgtgattgtctcatcaaagagtcccttattttcaggtgtcactcccactttaatatgaagagattcaccgggctgaactggatgtttatcaaacaaagcttgagcacatccacaagtggtagttacatctataataactaaaggttggtctcctgtattgacaagcgtaaacaaagtgtctttactcttccctaaaggaatagtttctagtaagagtgattccttttccacttttacggttgtctgaattggtgcaacaggttgtttcctacttatttcttccaaatataattcttttacgttcgggttatggacaggattacctatcaccaccactttattattcttgtctaataaaaatacttgaaaccgaatatcttttggaaaatgattgagctgatttagactgtctgatcgatccaagcaaatcggcttgtcaaaattctctcttattaataaagaatgtatctcccactgatcatcaaactgaaaaaaaaataagaaagggatattcttctgactgatagaatctgtatatcggataaattctttccaacgggataattgcaatttacaactcgtacaaccaattgagtctacaaaaaccaagactttgtaatccgaagtcgggattacgaaattagttgtatcagatgcaaatcgagtaaagacaatattttcaggaaatagtatctgtttaccctgccactccttaaccaacaacgttatcgcttccttttgcttatcttgacaagcggatagggaaactgtcagtaataatatgattagatctaaaggtttcattttatgtaaatgtatatacgtttgttcatcatataatacgtatatccgataaaaactatctacccctacaaaccacaagatatttaatgcttattaactataaaaagagtgttataaggcaaagaaagccatcagaagaaagtcgatctcgcaaaaaacgcaaagccctactcaactgtgtctccacagtcttttctgagatagagaggcgttccgctatttctttataggataaatgctcatgacggctcaaacggaatatctcccgacgtgatggcggtaattcttctatcaagctattaatatattcccgtaaagactctgcgtcgattcgttcttccgtaagagaatcggcatctgatagttgccgttgtaggctttccgtcagtttctcggagagtagccgattctctgtctctttataaactaagttacgggcgatggtgaatagataggcgtcaaagttttgctccacatctatcgtctcatgcttctcccaaatcttaagaaaaacgttttgggtcaagtcctctgccatagatttttcatatagtaatgagtaaataaaatgatatacatgctcattatatttccagaatagagtctcaaaagccttttcatctccattcttcagatctataagcaaatgtccatccactttcatattacatatatattacatatccacgccatacaaatcttatctcctttctgcatatttgcagttttcatatacatgagttctgatgaaactatgtcggttagtgtagatgatatgaatgataagataaagataatcagcggataactaaatagtaaaattaccgatggtagtggagaactaaagaaaaaacgaactagatggttgttatttagatatttatattataaacaagacatggtctcatcagaaccaagtacaaggttactaataaatatccaaatataaacaagcatcattacatatcgcaaatatacaaaaaaatgtaaatacagtatgagtatccttgaaatctagttaaattctacttgaggacaaagaatgtcctcactaattatccgcttcgcgaatgatatattgataaaggtcggaatgtccggttttatcgattatcttatgcttttcgagttggaatttcagttgggccaaaccaagagcaccaaagccgggaaggtctaataaagaatcgagtccgtttttgagggcgtaacgtagaatatcttctatggtttctatattcaaggttgtaaggcatttacggatatagggcgctaaggcgagacgggtaatgggttggcatatccgtttcgcggcatttaagggaacgggagtaagtgatcggggagattcgatacatagaccgttttggagcgcctttttatataatcttctcaattcgtattccatgttcctgttctctatccacagacgttctatctcaaggtcttgattcgtgattgttttcttgtattcggtcaggaagcccatgttttcttgcaagcggagcgatatgaccttatatcggcgacagattccgtcgtaggatataccacaacgtttggctacgtcttctatcttggctccggaagttatttccgtaaagataagtcggtctttcttgtcgtgtatgaatgttgatagttcggcgataatgagtttaagtaggggagagatgtttttaagggatcgcaggcagaaaaggtaatcatcgaattgggagatgatctcgtttatctcttcttccttgtcttggatgataagttgcaggtatagcttttgtattcccatacgctcgatatgggaaataaattcacgtaaattggtcagatcgactaggcgaacaccttgcttcacgacgtaagatgttatttttttagatatcgcccattgctggatttcttcaaatggaaagccggtgatacgagcggcttcttcaatagtaataaactcaggcataactatttgattaaagtaaaacttatactatttatctttaaaaagggcgttatttggcgttatattgaagagctggcctttcattataaaataaagaaagggcgattggctgaacattacgttgacaaaggttccgctaaaaacccacattagagtaaagtcagccgcacgcccccctttatctatatacaataatcttatccatactttaacagcatagataacacgtatattcggtaaagggttgcggggccttctttgcgcttctctaaagttgaaaaatttagcggattctgtcaactcgcacaaatatcgcacgcaacacaaggcttctaacttaaaagccttttattgtcgcaaatatacgtatttaaaaatattttagtctataataatccatacgttttctattttatcattgttttactaccaacaaagaaagaataagtagataaaaacctacgcttttaccttttgcttttctgtcttaattactagctaggcaaatatatgatatattctttaattataattgattattaaggaaaaaatcaagatggcaatccatcaaacagtacgaagactactaccctaaagtttatggaatgaccttacaaaacacttttatagcgcaaaaaagattaggtacattgccaaatggcttttttaggtagaaagttaccagttaactaacatttcaaagtaagttagcttcaacggcaaagtaagttaacttcattggcaaagtaagctaacttaaatgaccaagtaagttaacttcataaatccgggttgaaatccgcaaacgacatacaacacgcgtctacactcccaacactatataaccgctatggatatttgaagtattgataataggcggtttacttctgttatccgtaactccaaccttatcagtcaacaagcctttcattaaaagataagcacatcatgatggcacgactgtgccatcctagtggcacaccattgccataaggaaggcacaactatgccacgctgatggcactgccgtgccacgatatggaaaatgattggcactgcggaagtctgttaactagacagttaaggatggataaataattattcccctaacttatcaagcaactcatacgacggaacgaagaaaagagttcccgttatcggcgtgctgaagtccagcagacgatccgtattgcctacgggatcaccgacgaacatattctccagcattcgtcgggtggtgctgaacgtgctggcataggcgataaaataggtaccgtattcacctttggaggtatgggcgaatggcatgttagcacggactattttcagatcgtctccgatgttcgtcacggcgttatgggcgttcttcggtttttcctcatctgatagctcaacatcgttgaatttacggcgaccgatgactttctcttgctcttccactggaagcgcattccatgccaccatatcatgaatgtatttttgcacaaatacataacttccgcccataaactcggggtcctcatcacctattaccgcgaaacgataggggtcttcatccacggcaggattctccgtaccgtccacgaaaccgataatcgctttaccgtctctataccgaaaaccgtgggtctcatcaatcgattccacgacacctcgcagtttctggtctataatggaggcgaactcaaagcacagtcccatctgcttacagcggatgtggaatagtaaatccccgggggtagaaacagccgtaagcttaactcctttgatctcttcaaacggttgcaattccttggggtttccttgctccggaaagaaacgtttccaagcatccgccccgaatcctatcgtacaactgaattgcatatcaggatagcgattgcgcatactacgtatcaaagcggagaaattagcgcacacgtcctttaccttatcaatcgtgtcggggagatcttttagagcatagacaatgaaaaccgcattctcgcccggtttttgggtaacatcttgcggatagttagcgttcaatggattttgtagagagttcatagcacatctttaattatattgttattatatggatataactctatagatgcgctcttgttcaaggaaatgtaacgaaaaatgtcctagcggttatttttcaatatctatttgtagagacggggcgtgccccgtctcatcccttcaaaatagtaactaaagaatactatcagtctgtgggagacggggcacgcctcgtctctacaactgggtagttatttcacctccacgctgattctctgcgtgatatctgaggcggaggctcctagttggaggatgaactcgccgggttctacgacgaattggctttgtgcctcactatagaaagctaaagaggatacggggatgtccaacgtgattcgccgactctcaccgggtttaaggaataccttcttgaagccttttaactccttgaccggacgcatcacggagcaaaccggatcgcttacatacaattgggccacctcagctccttcacggtctccggtattggttagggtgaaagtcgcttggatcgtgtccgcttgatcatacgtctttttatccgtattcagattggaatagttgaatgtcgtataggataagccgtaaccaaacggataaacgaccggaagccccttcgtatcgaaccagcggtaacctaccaagatatcttcctcataattcactttcagatccctgccggggaagttgcccaacgcatgcgccggagattgatccaagctcacgggagtggtgaacggcatctttccgctcggattcaccttgccggataatacgtctaccaaggcatttcctccttccataccgttgaaccaagcccaaacgatagccggggaacaaatatctacggcagccatattcaacggcgatccggcgatcatgaccacgatcgtacgaggattcgcctttaccacctcttgaatcaactcaacctgcccgtatgggatatccatattcagacggtcgaacgactcggtatcataatcatggttcaaaccacaaaccaaaagggccacgtcactcgtgcgggcaacctctaccgcctctttcaataatgcgtcgctttcctgtgtcttggaagagaaagtaccagagctttgcccattattgcttccctccacgaaagtagatagcttctcataaccttgggcaaaacggatatccaccttatcgccccatttcgcacgaagcgcctccagcggggtcacctcgtagaccgccttgatctcggagctcaagccgccattggagtgcttacgggtagcgttatcaccaattaccgccagactcttgatcgaggagaaatccaacgggagaagattattctggttcttcaataagacaatggcttcggcagccgcgtcataagtggcttgctgatgctctttcgtattcatggagccggggccgaaacgctttttcgggtccaagacattcgtcttgatcatcacacgtaagacatcgcccaccttctcgtccaccaagctcataggaaccttaccggacttaacagcctcgatcaaggggttggcataataccaatcctcatatttatcgatcagcgtgcccatctccagatccaagccggcctccatagaaggaaccgtgctatgggcggctccccagtcggttacatatacgccatcgaatccccattcattccgaaggatcttgcgaaccaagtagttattctccgcgcagaactccccacggaatttattataagcggccattaccgtcaaggcgcctccctcctgtacggccgccttgaaagcgggtaaataaatctcacgcaaggcacgctcgctacattccacatcgacagtcgtacggtttgtctcttggttattcacggcgaaatgctttacgctgcaagccacgtcacggctctgcaagcctttgatataagcgaccgccaatacggagttcatataagggtcctcactcatatactcgaagttacggccacaaagcggggagcgaatgatattcacgcccgggcccagcaatacgtccttcttacgccaacgagcctcctcgcccagcacctcgccccggcgataagccaactccgggttccaagcggcggcgaaagccgtgccggtcgggaaataagaggcggaatcatttgtccaacccgcatatgcccagtcgtggcgattgatctccgcacgtaccccgtgaggcccgtcgctcaagctccactcgggaatccccagacgctctactccggcaacatagaattttgagttaccatgcaataatccgaccttttcctccaaggtcatcttcttaatcagtttctcgatacgtttctccatttgtaccttctctttatccgtgacctgcgagctcgcggcagccgcgttcaagaatagcccgcaagcgatcacgcctattatctttttcatttcctctttatttataggtttattattgcgcttgaatcgttaccgtcgcctcgggtaagccctcggctacggcttttaaacggatgtcgcctcgtccgcccttgttccggatcacgaccaaggcttttccatagtaagcttgccgtttcggtttacggaggctgttcggatcgttcggatctccgttatccgttccggcgatctcacccgggccctccacggagaaacggatcaacggggtagcgtcgggaacccggttaccatcgatatcgcatacatctacggttataaacgataggtccgagccatccgcttggatgacgctacgatccggggtcaagaccaaacgggccagctctcctgccgtatggatctctttcaccaagacctccttaccccctaagcgggagacggctctcaaggttccgggcgtaaaaggcacacgccaagagacatgataggtactgtccgttttttgtcgtacgcctaggctctttccgtttaggtatagttccacctcatcggcattgttataatagccccagatatccaccggttcgccttccttccagttccaatgcgggaaaatgtgcaatacgggttcatccgtccactcgcttttatacatataatatacatccttcgggaaacccgccagatccacgataccgaagaagctgctccggctcggccaccaatagggggtaggctctcccaagtaatcgaaacccgtccagacgaacaggccggatacatgcggaagcgtcttcaccagatgccaagtcttctcgtgcgtagagccccaaggtacatggcaattatcataagaggagcaaacatgttcgggagcctcgaaaggcttgtcccacgattccggacggatataaatatgatcggacggcatctcataatagccacgggtcatcaaggccgaggtagattcgctcacgatcagtttctttccgggtaaattccggagaaacggctcaagatattgctcatggtagttgaagcccagcacatccaaggcatccgagcggaacagatgattcgcagggtttacctcgttacagccggcggtaacgacccgggaggtatccagccgtttcacgatagccgccagatgacgggtgatcaaggattgacggctaagggtcgtatccttcagcaaagcgggatcgatggcatggcccgcattcaagatcaggttcgccgcttgcagatccagctcggtagcgtcggcatgactccattgctcaagtacctcattgcctatactccacatgaaaacagaggcgtgattccggtcacgcaagatctcgtccgtcaaatcccgctcgtgccactccgcgaaataccgggcgtaatcgtacggagacttacggcgttcccacatatcgaaagactcatcctgtaccagaaggcccatacgatcgcaaagatccagcaactcgggtgccggggcgttatggctggtacggatcgcgttcacacccatctccttcatgatctgtagctggcgctcgatagcccgtgtattcacggcggcacccagacagcctaaatcatgatgcaggcaaaccccttttatcttcaaaggcttatcattcaaataaaagccggtagcggaatcccaacggaacgtacgcaatccgaataccgtctcgtaacgatctaccaccttaccagccactttcacttccgtgacggccgtgtagagcgagggagaatcggggctccaaagcttgggatttgagatcgagaactgatgatcgacagatgcctcccgcatacgggtgtcgtaacagggcgtatacggtacccgtaacagagttgttacgggtgccgtaacaactctgttacggtcatcgtaaatagaggtagagacttcggcctccctatccgcctccgagctattccttattctcgcctccaaggagaaggtagcctcctccggtgagatcttcatatcatgcacgaaagtgccccagttgtccacatgtaccggattcaccttcaccagccatacgttacggtagataccggagccggaataccagcgggagttcggctgctcgctattatccgccttcactacaattacgttcggttggcttccatacctcaaataaggcgtcaagtcataacgaaacgatacataaccattcgggcggaatcccagcgaatgaccattgatccaaacctcgctattccggtaaaccccgtcgaaatcaacataaacaaccttaccccgatccgtctccggaagggtaaatgtctttcgataccagccaatcccgcccggtagcgcgccgccgcccggggtagacgggttatcgagggagaaatccccctcgatactccaatcatgcggtaaagataagatacgccaagtggaatcatcgctgtccggggatgaataatcctgaacgctatccgacaaggcaaatttccaatcgtcattccatgagctacgttcacgcacctgctccccggtgggggaacaggcggtgagcaataggcccagaagccacgcgaatggccgattcatcagtgatatcattagtgattatatagtttaattgatattacccagttgtagagacggggcgtgccctgtctctacaactagaggtttaccttggtaagatattgtcacgtccttgccagcggggttctccggcgtgatgagacgtaccgtgatctgacgctcgcggatcatgcccggataatcgccctcccgcgcgccgatcgtgagcgttcgcctcgcatcatcataaacaaacgggatggtagcgtaatttcctttctcgtaatcgtaggtcacgccattatcctcatataaggtgaaggagccgtcggcaccggcgtaaacagagacggttaagtctttctgctcctctttcgtagactggattacctttccggtcggtacgatagaaccggctctcacgaacaaaggcatacgctcgtaaggagcatccacgtccattgtcgttccgccttgcacaggcttgccgttgtaaaaatcgtaccaaatgccggccgggaagtacacctcacggtcgcgagccttatactcatacaccgggcatgccatgaaggccgggccaaacataaactggtcgtctatatcgtaagtcttctcatcgtccgaataatccatcaccaaggcacgcatgatcgtataatcctcaaaatgcgtcttggaggccaagctatagatatacggcatcaattgatagcgcaactcggtataatacttcatcgattggtacgtaggcgatccttccggagcgatattatagatctcgcggcaaggatattgcccgtggctacggaacaacggacagaaagccccgaactgataccaacggttgttcaactccctccattccctcaaatcctcgctaccttcctttgcggccatataacggttctccacgctgaagccaccgatatccatcgtccagtaagggataccggacatggcgaagttcaagccggcgctgatctgcgctttcatatcctcccagcgagtaccgatatcgccactccatgtagcggtagagtaacgttgctggccggcgaaaccggaacgggtcaacaagaatacacggtcatccgggtttacgctacgttgtccgtcgtagatcgcctcggcgttctccaaggcatacgcgttgaagtatttcgtggacgggcccagataagtcggtccgcaaagcgccttgcgatactcgatatccgtattatcctgtacgttcggctcggaagcgtccatccaccaagcgtcgatgcccaaggaatacagatgctcgttcatctgttcccagaaaagcttgcgggcttccgggttgtacgcatcatagaaagaaccgatataacccggataaatccagtcgcggatactatccttaatcgcctgctgatacatagcacccagcgcgtccaactctttataatgctctgtcgtataatagaacttcggccatacggagatcatgatacgggcatccttatcgtggatttcctgaatcatgcctttcgggtccgggaagcgttccttatcaaactcgtggctaccccatgcgtctaccggccagtagctccaatcctgtacgatcacatccaagggaacctgccgccggcggtattcgttcaaggcggtcaatagctcctcttgcgtcttataacgctcacggctcaaccagaatcccatcgcccatttcggcatgatctggctcttgcccgtaaccgtgcggtaaccgctgatcaccttatccatggaagactctccgttgatgaagtagtaatcgatatcatcccccatttccgaccagaaagccaaccgctcccgctcctcctccggtagcggagataataccttcaagccgatataagatacatctccatccggcaaccattcgatacggatcggataacgtttgcccttttccagatcggccgtagccttgtaatcattcgggttccatgccgcgcgccaacgttccgggatgatctcctcgttattcacaaataccttggtataaccggcgtaatgtagtttgaaatgataagtacccgtctctttcgcctcgatctcaccctcccaagtagcggaagcgctcggcttcgggaagtctgccggcaggttcttgatggttttcagattctcataatctaccttatcttcatcccgctggattaaaacggaattcttcgccttatccgtatagtaggtagcggtcaacgcccctgccctcccgtcttttccgtataggccaaagacatcgcccaaatcggcgtatggacgcttgtcgccgaaacggctcaaggaatagttatgccaaagtacaccatacccttttgaggaaacgataaacggcacgctcaccttcgtgttatattggaaaagctcctcgttcttgcctttatagttgaactcatcgctctgatgctgtcctaggccgtaaagcccttcctcgtcctcgctctcaaatacctgacgtaaggtataacctttggttccttccacctcgatcggcgtaaattccttgcctccgtttgtcttctcacgaaggatcgtgtgtccgttggcgtcggtaaagcgaacctctccggtctctcgtgaaagacgggcctgtgtggtttgcgtacttacgatgatcgtatcccccgaggtcgttatctgaaacgatggggcgggcaacgatttcgtgtccttgatcaagttcacttggttggaaaacttaccatccggagaggcgattacccgaataatatcatcagagattacttccaatttaacagccttcgcctgtccggaacggatatcggcgaccaagccattctcgaccttccggtaagcggaatcagtcatgcaggaagtcagcagggaaagccctaacgtgaataccgcgatgtgttgtttcatattctatagattctttaattatttccgatcagcaatgagtccgaacaggtttttccatacaagaaaaatggttcttcattcgttggcaaaattaaagggttcgcggcggacaggaagccataaatgttttgggttacggggagaaccgtaaaaaggtaggggaagaatgtttattttaaggggatattttgttatatcccctaattacgtggcatttatttagaaaaagtttatttatgatagtcagagggaagccttccgaactcatccttaaaatacttccggaataacttcacatcattaaaaccgcactccagcgcgacctcgttgacccgcatctggctcttttccaataactgcgccgcacgcttcaagcgcaccgtacggatcaactccaccggagtcttacccgtgatggaaaggcatttcttgtagaagttcacacgactcatgcccatctcccggctcaaccgttctacagacaactccggattggcgatctgctcctcgatatagccgatggccttacgcatcaactcctcatccatggagctagcttgtacctccgtcaaggcgatgcccatggtagaggactgcataaaggccttttgcatcttcttcttcatctcgatcaaatgccgcaccttcaagagaagcatctccatattgaatggcttgctgatataatcatccgcaccggcttccagaccgaccagttggctatctttagcggactttgccgtcagtaggatcaccgggatgtgggaagtccggatgtctcccttgatccggcggcataaggtgataccgtcggtgataggcatcatcacgtcgctgatcaccatatccggcagctcctccggaatgagtttccacgcatcttctccatccgccgccgtgagtaccgaataaacgccactcaagcttaacttcataaattcccggaaatccgtgttatcgtctacgaccagcaacgtaggtctttccgccggagacgcatccttatcagcgatctccggatgctcctcaaccggaggcaagatatccccttcggcaattccttccggagccgagataatatcttggttgtccaaggggatcaccggcagcgtaaccgtaaacgtactacccgctcccggctcgcttttcacggttatcgtcccatgatgcatccgcacgaattcccggcataggtgcaggccgatacccgtacctaccacgggatttcccttatccggggaagccacctgataaaagcgatcgaagatagctccttgtttatccgcaggaataccgataccgctatccgacacctcgataaccagtttgttctctccctccttctccaaccgcaatctaagcgtcaccgagatagtacctccctccggcgtaaacttaaaagcgttactcagtagattagagacgatcttgaagaccttatccgtgtcaaacttcatcgggagagacgtgaagaccgaggaaaaagagaaatgaatccgcttttgctccgaaagctccttgaaggaataagccacgtcacgcacaaacgggacaatatcgccggtagacaagaccaagctatccccttgcatatcgatcttgcggaaatccaataactggttcaccaatttaagcaaccggtcggcgttccgatagatcaacttcaatatttgctgggattccatgtctttctccgttttcatcaacttctccaaaggagtcatgatcaatgttagcggcgtacggaactcatggcttacgttcgtaaagaaacgaagcttcatctcgtccacctcatgctgctgacgcacagtagcccgttcttgctcctcctccaacttcttttgctggatacggaaaataaaacgtatcacgccatacgccaataatataccagctatgatatacaacgctattgcccatccggtagcccagaacggaggcaggatcgtgatctgcaagctcgtgatctccttgctccaaatccggtcgttattcatcgcctttaccttgaaagtgtaagttcccgggttcaagttcgtataggtaatacgacgttccaaggcgcttacggtagtccattccgagtcgaagccctccatcttaaaagcatatttattcttcaaaggaaggaaatagcaacaagaagagatggtaaaggagaaattacgttccgtataattcagtttcaattgcttggtacaggtgatatctttatccaaaatcacatgcccgtcatacgcctctctcgccgttatcgggacattattcaccataagtccggttatcaccgccggtggagcatagctattataacgtatccgggcaggatcaacgaaggtaagaccgtttgtcccaccaaacgccaactcacccgtttccagcccacaagcgctattcacattaaacacacgtccttgaacgccctcattctcatcatagctattccaatcgaacgtataattattatccgtatcccgattcggaacgatattcaataagccgttcttcgtccccacccaaaccgtatgatatttatcctccaagatagacatgatgctgttatccggtaatccggaagaatggttcaaccgatacatcttatcattcaacctatcatatatatgtagcccatgattactcccgatccatacccattggcggctatcacaaaatacgacattgatgatttgatcctcaaacacggaacgtccatccttcgtgccgttaaaagaagtaacagcccccgtctccgggttgatccagttcactcctaaagaagttccaacgacaatattccccttctcatccccggaaaggctatatacgatatccgagttaatcgcattctccttatcccccatgcgataatacgtccatttcccggtagattgatccaagcaatccaggccgccttccaacgtaccgatccacaaacgattcttggcatcgacatacaaactatacacgctattattggataagccgtccttactgcccgggatatcccgataatgcttgaaacgtttcccgtcaaaaccggtcaacccctccatataagtacccagccataacttgccatccaaatctttcgccatactaatcacgacatcgccggagatagcgttctcgctttcccgtcccgcccggtagcggacatactccccggtttcccgatcgtaacgtaataggccgtttccgctagtaccgatccacagatccccttctttatcttctacgatacaattaaagtcattgttaaagatatcccgcatcaactccaaagggtaccggatagtctggaatttaaaaatgctctcatgataatagttgatgccgtttttataagtgccggcccacataatccccgtatcatcccgatacaagcagatcacgctattctggctcaaactcgtttggttaaacgggttatttcgtatataacgcatccggttcagacgtttatccaagatattgataccgccatgatcggtagcgatccagatattaccgttcatatcctccgccacgtcacgcaccattatagaggataaagcgaccgaggtttcggtcgtataatgtttccactccttgcttttgggatttaggcgaaagagacctctactatatccgggatttaagaaaaaccacagatccccgtcactatcggcgaacacatagaataactgggcattcgcatattgagtcagatactcatcccgatagacagattctccggatgccttatcgatcccctctaccactcccgaggtatggactacatatagacgatcgcccacgtcactcatatcacaaacccggccatcctctttatttagtggatacgaataaatctttcccctcgcttgatcataacgacaaaattcattcgtataggtagcgaaatagagttgtttatcattgtcgacgaatatcttagcgggaggattctctagacgtaagctatctaatatttccttctccggaataaaacggtcattaccgggctcatatacgcaaagttggttcgtattataggtaatccaaatacgcccatcagcggtttcttgaagttcggagacatgctcctccctaaaaggcaacccgctttccttgtatttataatgcttaaactcatacccatcaaaacggtttaccccagaagtggtacccaaccacataaaccccttccggtctttcaggatacaagtgatctcattggaagacagaccgtcctgtactcccagacggttgaaaagaatatcttccgccgcaagtccggatcccaatattccccaagacaggatcattatgatacagagtagagttttcgttttcatacttagcaaatatagatatttcccgagaacgaaccaaaccaaccggtatctaattctgctgcaatgggggttgcagtaaacatacacgtaaagtatccatatataagaacatgattattaaaaattatcccgtacatttgtctttcgattggaatagaaatgaataaggcgcaatgattgttgtaagagattttgacagactgaaaggaaaggaactggtggctacgatcggatttttcgatggtgtgcatctaggacaccgtttcttaatcgacgagatgaaagagattgccaaagcacgtaacctgccatcggccgtaatcaccttcccggaacatccccgggctgtattgcatgcggattaccaaccgaagctattaaattctttcgaggaaaagttacagcaattagagactaccggagtagattattgcatcgtattggattttacgatcgagctatcccggttctcggccaaggaattcattacctctattttagcgaagagcctgcatgtaaagaccttattgatcggatatgaccatcgtttcgggcacgatcggacggatggcttcgagcaatatgtcgtttatggcaccgaatgtggtatcgaggtgctaaaggcatctccctatgacgaagggaatacggccgtcagctcttccgagatccggaaattacttcaagccggaaatgtagcggaagccgcttatttactgacctatccctatcaattgctgggccatatcgtcagcggctataaagtgggacgcacgctaggatttcccacggcgaatatacgggtagatgagccttttaaagtcattccgggtattggcgtatatgccgtatgggtggaggtggaaggcgaacgatataagggaatgctttatatcggtgaccgtccgacactcaataatgggaaggacatatccatggaggtcaacattctggatttctccggagatatctacaacgatagcattcgtgtctcattcgttcaatacgtacgcggagacatcaaattcgattccttagaagaattgaaagcccaactggagaaagacagatgcaccgtaaataatttattataatatggaaagatattacgaagcgattgatttattaaaaggcatgatctcccgtccgtctttcagccgggacgagaccgccgtagcggatttcctgcaagcagaatggcaaaaggccggacaaaaggtgttccgcaaaggcaacaacctgtggatcatcgccccggatttcgatttcggtaaaccgacccttttactcaactcccatatagacaccgtcaagcccgcttccggttggaccaaagacccgttcactcccgaagagaccgaggatgatcaattatatggactgggcagtaacgatgccggggcgagcgtagtctccctctatgaagccttctgtatcttaagcgagaaagaacaaccttataatctaatcttccttgcgtcttgtgaggaagaggtatccgggaagaatggcattgaaagcgcattggccgagcttcctcctatctccttcgctgtcgtaggtgaacccacgggtatgcaacccgccgtagccgagaaagggctaatggtactggattgtaccgctatcggaaaggccggacatgccgcacgcaatgagggtatcaatgccatcactctagccatgaaggatatagaatggttcagcacctatcaattcccggagaaaagcgacttcctcggaccggtgaaaatgactgtcaccatcatccatgccggtacgcaacacaatgtcgttcccgataaatgcgaattcacggtagatatccgcaccaacgaattttatacgaacgaacagttattcgagctaatcaaggaaaaggttcattgcgagatcaaggcccgcagcttccgccttagctccacccgcacggatctggatcatccttttgtgcgacgggcgatcttgatgggaaaagagcctttcggctctcctacgcttagcgaccaagccttgatgcgtttcccctccgtaaagatagggccgggaaactcggcacgttcccattccgcagacgaatacatcaagggaccggagatccgggaagcgatcgatacctatgtaaggttactgaatggattacaactatagcttatgttaaaaaagatactggggacaataggctcgcgttatctgatagctttccttaacctagcgctgatcttcatcaacgcgaaggtgctgggaatcgagggcgtggggatgatcgggttgatcgtggcctcggtaaatatagcggtaatcgtcaatgggattttatgcgggaatacgattgtctatttcatgaaccgttactccatgcggacaattttccttcccgcatatctgtggacacctatcggctcttccctagcttgcggcttcatgtatcttactgggcttttacccaccggctatcggctggatatcttcttgttggcgatcttgagctctacggtaaacgccaatgcccgcttcttgttgggtaaagacaatatcaaagggtttaatctcacgtttatattgcaaggaggactgctatttttcgtcttactctatttctattatatattgaagcgcccggacgtacggtcgtatgtctggggattatatgtcacgaacggcatagcctttattgccagcctatcgatgcttgttccttatttcttaaaggagacatcccggtcttccggcaaatcactctacggtctattaaaagaaatgtttgcctacggcctgtgggccggcgcggacgggttggcggaaacctgtactacccgactcaattatttcttgatacaacgtttcgccgggttgggaagcgtaggcttgctagacgctgggaccaagatctccgagagtgtatggaatattagtcgcagcgtaagtttcatcgaatacagtagcgtggccaagacctcagaggcaacggaacaaaaacgtattaccttacagcttttcaaattgaccttttgcgctttagccctcgtgatgggatgtatcctattggtaccggaatggatatatacggattatcttttcagcgccgagttcaaaggcatacgtaaagtgataggcggattatcgatcggaatcgtagcgttaggctgcaacagcatcatcagccattatttcatcggcagcggaaagatccggtacagtacggcaagctcgtgcgtagggcttattgccttattaatctccggctttttactcatcccgtcttacggggtcgtaggttccgctatcacgaccagtatcgcctttacctctatgctggttttctcattgacggtcttctcccggcaaacacttacacgctggaatgagttccttccggacaaaaaagacttccaagcttgcagaattcatatacaaaaatccctgtaattctatcacgaattttatcgataacgctatcaagttcacggaaaaggggacaattacgcttgaaatgatttcgtgcaaggtacagctctcgggttatcaaaacatagactgtaccctataaacaaactccatccaaacccaataacggatcgcttttcctaagaacatggagatcgccacgacccatatattagcccgcaagaaacctagagcgacagcgataaaatcaccgataccgggaagaaaaacaaagaagcccatccaagagccttttcccttgatccaatcctgcaccttctgtagttttaccggatcgagtttgaggtatttctcgatccactctacctttcccagcatccccaaccaatagcagctcattccacctaagaaattaccaagcgtagcggcgatcatacaaggccaataagccgaacccgccaataatacacccgtcaatacgacctcactgctaaacggcaagatcgtagccgctaagaaagaagcgataaacaccccgatatacccgtaggctataagaaattccatatacgtatcattaataatgcgataaacataactaccgagaaatggaacagccaaaagatatatttcccccggttcaccgtaaaaaaatgggcgatcaggatagacgccggtacacaggccatttccagaaattcctcggacgactgctcatagataaagaacaatccaaacgaccaaatggccatgacaatcagaaaagaaagaaactgacgagtacgcaaattatcctcatactcatgtgtaacgatgtttaatgaagcaatgatcgttaatcccgccactaaaacaatctgtatccaatctataattcccgtccctagtaccgcaaggaaacggatcttgaataaggaggtgaaaggtatggtaaatgccgtgaaatcccattcccagacacaccatccgaaaacaaaccaataaaccgtcaagattccgaacaaggaagcgacaaatgtccggatattcaatgtcctgaaattatacattcccaaccaaaacagcggcaaaaaccaaaggatgtgtatccacaacagacttccgatactgataatcaaggatgcgttataagccttatccgtagcgtccgggtcatgataagaggtaaataactgataaagggccaatatcaaacaaaacaccccgacagatgttgatttcaagggaaagaaatccgggtttgtacttgtcaacaaggcatagaagagaaagggaagcaatgtcttctcacgaatcaacatcaacgcatagtttacccgatgcaccagaaacgcaccaccggccatcagcaaaaaaccgatcaaataggtaaacaacttacccggaagaaccagacagagggcattccataaaggaggagccgtcacctctccatacacgggatagcctaccgaatccacataccccacgatccaacaaaaaatacaagcgcaaagcatgtacaaatgggtcataggtgtcgctatagtatatctacgtccgtaatatgaagttgttcctcttgccataatcttatcttagtgtgaaaatacggtacctgcgttagtgcaagcaccggagcgacgttcgtagtgaacgccgaccggtactcaccgtaaacgccgactgacgttcactgcaaatgccgaccggcgttctcgataaacgcaattataaatcaaacccgatatcccgacggaaatacttcttatcgaaatcgatctgcttagctccggcgaaagattgggccaaagcctcttccttagtagccccatacgaactgaccgcgatcacacggccgccattcgtcaggatctggccgtctaccagcttcgttccggcatggaacactatattgttcgaggatacgccatccaatcccgtgattaccttattcttctcgtaagcctccgggtaaccgccgcttaccaacataaccgtaaccgccgcacgaggatcctgtaccaatgtacggcccgctaaattaccttccgctaccccttccagcaaatcaaccaagtcactttggatacgaagcatgactacctctgtctccggatcgcccatacgacaattgtattctatcaccatcggctcattcttcacattgatcagacccaagaagatgaaacctttataatcgatatgctccgctttcaatccctctacggtaggacggataatacgctcgtccaccttcgccataaagacctcatcagcgaaaggaaccggggaaacagctcccattccacctgtgtttaaacccgtattgccctcgccgatacgcttataatctttcgctaccggaagcaccttgtaatcgttgccatccgtcaagacgaatacggagcattcgataccatccaagaattcctcgatcacgaccgtcttgctcgcgtcgccaaacattccgcccagcatatctcccaactctttcttggcttcctccaagttatcgataatcagtacccctttaccggcagccaatccatccgctttcaatacataaggagcggaaagagattccaagaacgcatagccttcctctaggttttcagtggaaatactcttataacgagcggtcgggatatgatgacgcatcataaacgccttggcgaaatccttgctaccttccaattgggcaccttccccactcgggccgatcacggggatggagcttaatgcctcatccttcttgaaataatcataaacacccttcaccaatggatcctcgggacctaccacgaccatattcacttggttcgccaacgcaaaatccttgatagcggcaaaatcatccgctttaatatccacgttggttcctaccaacgctgttcccgcattaccgggagcgataaataacttatcaactttcgggctttgagcgatcttccaagcgatcgcatgctcacgcccaccagagcctaataacaatatattcatatctcttctaattttcaattctcaattctccattttcaattcccaaggtagtcatcgaaatacctcgtaatcttctcatgcaaatgcggacggtccttaccggtcacattatgctcatggcgaggatacacaaagtaatccggatacgtatcagcctctacgcaagcctttaagaaaccaaggctgtgttgccacactaccaccggatcgatatccccatgtatcatcaacagatggcctttcagattaccggccttcagtttcaggttcgcgttcttataaccttccggattatcctgcgggcgatccatataacgctcgccatacataatctcgtaattgctccagtcgataaccggccctccggccacgcccaccttaaagatctccggataagtcagcatcaagttcgttgtcataaaaccgccataactccagccatgtaccccgatacggtcggcatccacataagacaaagatttcaggaactcgacacccttcacttggtccgccatctcattgatacccaaattacgatgaatcacgctctcaaaagcatgtccacgatttgccgagccgcggctatccacggtaaacatcacataacctctctgtgccatatagaggtcccaaccacgagccccgttttgccagtcgcccgtaacaagctgtactttagggcctccatatacatagacaatcgtaggatacttcttcgtctcatccaaatccggcggtaaagtcaaccggtaattcaagcgagtcttaccatcggcagcaaggatatgtccaaccttgatccgcggcatccgatacgatttaaagggatccggagcggaaagtaaggtagaaatcaccttagcgtcctttacacggattaaatcgatatccctcggggtagaaggagaacttacataatcaatcgcatattcgccggagggactcagcaaccaacggtgcacgcccactttccaactcaagcaattcatgatatcacccgttctcaaatccgtctcccaaatataacgttgcatccccgttccttgcatattcggagatacgggatgaggtgccgttccctcgaaaatcaccttatttccgtctttgctaaagcctagcaccttggtaaccacccattccccaccggttagcttccttaattcctttccggtcgtatcatacagatatagatggttatagccatccgcctcactctgccagataaacttatccggatcgttcggcaagaaaagcacgggatgctgcggctccacataacaacgatccgtctcggtaaacagatcagcctctttctttcccgtcaaggcagagtaccgcaccaaatgcatctcgttctgctcacgattcaactcagcgatataaatactcttctcatccggactccaagcgatatttgttaaatatttctctttcggcaagcctgtctccaaccaaaccgtctgcccagtagctacctgatagacacccaccgtaacctcatggctcttcattccagccatcggatatttatgaggaaccggcgtagcgcaacgagtatcgatattcaccagcgggtaagcggtcaccatacgctcatccatacgataaaacgctagagccgagcctttaggagaccaaaacatacctttcgtaatcccgaactcccgttgatggacagcctgtccgcatacgattccatcctgtgtttcacgtgtaacaatcgtatttcgtccatccggggataaaatatgcacattgtttccctccgtaaaagctaagttattcgtagccgggcaaaagtcataattcgcccagttattcttcaaagcataatcagcgactaccttattcttcttatagtcataatgaatccggtgctgtttgctagtaaaagccaagaccgaaccactttcataaggtaccgaaaagctaggcaaggaaccaaccgtctgtaggtttgccaccgtcaaggccccattcagtctttccaacgaaaaaaggacctcttcttttttccccggcttagctcctaacacgctatctcctttcacatataagtactcgtccccgcaccatcgtaactgtttcaagtcacgaggtacgaagcggctatacgtttttcctcccggaatcaagtcgtgcaaggagagttgcttatcttgggcggtaatcgacatcgttaataaaatcagacataggcttatgaataaagatgatttaatcctcataatcatcataccctctccgttttataggctttataggtttgctaaacgggcgctttccatcccgcttatgatcgccaaaccctttcttacggtcatcctcatcccgataacgcattttcacaggacgttctccttttggcttgatcggcttacgaaccggggcatctacgaatttcttgcggaccggacgatcctctccccgatcctctccaaagatacgtttccccggaatggaagcgaaacgctcctcatcatcctcgctatgagcagcggcgaaacgacgttccggacgatccacacggcccgtacggaagtttggacgatcattgcctctacgctcgaaagagccttccgatctgtgcggacgctcctctccatcctcattcaatgcctttttgaagtccttattggttccctcaaataactcatagcaacggtattcgcactccaaggaaccgttcatcaatttgatcttctcgctcgggcgcaagccgatcttatcgaaacattcatctttatagctcaaaatccaagccttatatcccatgaacacatgtttcaaacgctcgccgatcatattatacaatcccaatagatcacgagatgatatacgctctccataaggagggttcgtcaccaatatacctggcttcggagcctctgtatattgttggaacggtttcaccttcagatcgatatatttcatcaagccagcgctacggatattctccaaggcgatatcgatagcggcttgggaaatatcggagccatagcaatggaaagcgaactcacgctccccgctctcatcattataaatacgatcgaacaattcctcatcatagtccacccatttctggaaagcgaactctttccgatggatacccggagcgatattcaaggcgatcatggcagcctcgatcaacaatgtaccggaaccacacatcggatctacgaaattagattctcctttccaaccggtttttaggatcatgccagcagccaacacctcattcaacggagcttccgtttgatccacccgataaccacgcttgtgcaaagactcgccggagctatcgatagataaggtacaatcgttatgcgaaatatggatattgatatataagtccgggttattgacacgaacggacggacgcttcttgaacttctcgatgaaataatccacgatagcgtctttcgtacggtaagcgacaaacttcgagtgattgaaatcctcggaatagatcaccgagtcgatcgcgaacgtcttgtccagcgacaaatacttctcccactctacctttttcacctctttataaacggtatcagcatctttggccttgaaatgataaatcggtttcagaatgcgcagggcagtacggcagtggaaattcgctttataaagcaattccttatcacccgtaaaggaaaccatacgacgaccgatctgcaagtcgttggcacctaaagctaataactcctcggccaagatctcttccaacccgtatagggttttggccaccatttcaaatgtctcgctcattttaattgaaaattgagaattgagaattgaaaattattcccaattgcgtattacgttgtttattattaattattctcatttcgctctctgacatgcttcgatctccttccggctaccctcttgataattttcaattctcaattttcaattgtgtaaccgtactccctgccggtacatcctccgctatccagacgttaccacatatcgtagcccctctgccaatccggattttaccgattaaggtggaattagaatatactgtcacatgatcttccaagataggatgacgggctacgccacggatagcgttaccgttctcatcggggggaagtttctctcccgccaagctgacgccctgaaagattcggacgtaattgccgatcacgctcgtctcgccgatcaccgtacccgtcccgtggtctatcgagaaatgatgaccgatcttcgcgcccggatggatatcgataccggtctcggaatgtgccatctccgtaatcatacgaggaatataaggaaccccgagcttatacaattgatgggcgatccggtaattaccgatcgcccggaaaccgggataacaaaatatgacctcacctagattttgagcggcgggatcgccattgaaagtcgcctccacatccgtagccagcagaccgcgaatctccggaagcgtagagatgaaagcctccgaaatagcctctgcctcagcggagatcttttcttccgggcaagtcacgcaagatgtatccgcgaaacaaagtcccgcataaacctgcttggataataaagaatgaagagtctcaacatttacgcccgtatgaaaacggatcgtctgtttactgatacgggcattcccataataaccggggaacaggatcgcacggcatagatcgatgatctctttcagcacctcgcccgagggcagcgcctcctcatccctgtacgcatggaacaattgtttatacgatgcctcatccgacagcttctccaccgtatcgcccaatacgctactatgcctctgtatatccattatttgcggaatattctttataatgcgcaaaaatagtattttatttgagaacaccttcacgaagaggcatcaaaaatacagccaacgactaatattacgttctatagcgctaaattccacgccaacctttaccaactcacgcccatccgcctgatagagttacaaataaataatcttcatatcgaatactttaccacatccaatgctccactttcatcaagagccaaggcgaccagaaaaccatcggaagggtctacagcaatcctctttattgaacgatcaaaattcaatcgtttctttaattggccgtcccaagaaagaaccagcaatgtggataaattcgaaaaatccacagaaccatcgtacaagcaatacacataccgatccgtaccgaatatatcgataaagcattttgtcgttccaagaacatccacttgggtatcattcttcttcagtaaaggcacgataggctccttcccatacgtaaagctcctttgataagttcccttcaaatcgtaaaaatcaatttggttgaagaaacgcaaggcagcaaccacactgttttgccgctcattcacacaaagattaggcaaataagcgacgtgcttacaagaacgatacgttcttgctacttttggtagctccacccaataaattccctcttcccgattcgcatagcagaaaggaccataaacatttttctctacgatcggaaccgcataaacttctttcgtggtgacattataatgcgtagagggaacaagtttgggtattagtatatatttccgatcaaaacgcaaagaatccgccagcacctgcatcttattaaacgtaagttggttatccacgatccagaactcatcctttccggcgggttcttttgtatttgacttcatacactccgggttagagaaataagtggcaccatatcctttcaacgcaaacgcatgcaggtgcgacaaatcatctttgtcgaatacttgaatgattgtatcacacccacgagccaacaacaccaaataagactcggtaagaccaatcccatcatagcatacaccagaatcccctttcattaacaaatttccctccagccgtttttcttctctttccgcatcggaacaagcgagaagaaacaaagcgaagaatacaataatcccatacaatactctcatgacctttctattttaaataaacataagatcggattatcttcctgtgtacgattctccgctatccgtctcaaatcctcataatgtatctgattacgcaacagcaccgtcgaactaatcttcccgataaaataatttttatacactccgcaaataccgtaaaagcctgtcaaccccgtagcccttatgaagttggggaacacatacgagaatgcctctttcctatccttgtcataaaatccgaagtaagttaccttatcgcacatataggtcgcatgcaggatccgttcggtctccagcagcccaaaagaatttacatagccggagcgaaacagatcgccagagaaatctctcccgcctctccctttctccttgacatactcgataggaggcatacttttatctccgaagcgaactttataagcaggctccaacatcccgtccttcactttccacacttcgggggtaaaggggaaatgcgcataccaatccccagcaaaggcatgcaacgtcttgctcccattgatcgtatggccggacgtgaaataagccggtcccaacaatgcgtcttgctctcctttcctgtccgcggctttcagatagaagttttccctttgcggtgtcgcaaatcccaaaggataataccaaatccaattctccttatccaaaggggcgcagtccacaaaataatcagctacatcttgcgtggatatatattgataggtatccagatcataacgcaataaggccgtcccaccaaaatccaccaatgtcaagattcgctctttctcatccacgaaaaagtgagttagataaagatactcttccggcccttgtccccgcaagcctacacgagtaataaaatttccttgatcactgaatacaaaaagcgcatttatctcatcacttctatcgaatacaaaaatacgatcgtccacccagcaaacccggtagagatcttttaacagcacgctatccttcgtctccaaaggaatgaatctgcattccaaatgttcctgcaagccaaccgtacaatcgtttccgaaatccaccacgtcccactcttccgatcgattctcgcatgcggtcaaaatggaagccagacttatcatcactaaataatatagttttctcatgtttttcatattagattcagaccactaatatacgtaactttttgaaatacgccaactgcacaagttttcctaagcgcacaatcggaattcacgagaagtactactcccttggcctatgaagtatatctcttagggatacagtgcttattttccacatagttattgtacatttttccaaatgcatttaaaacctcattatctgtttcccaaaacacgtacgtgttttcacaaattctcgtacgtgtttccggaaaaacacgtacatgtttttccggaaacattatcaactttttatcagtctgattataaagacattatcaatacgtatattttaaatacttactgtatttttcactatcaacaaaacaccttatggttatgatttttgaagccccaagaaggctttatttacgagcttatcgacttccttatacagccgttgtatttcctttgtatccaatccattttgttcccactccgtcttatgagcgtcgaataaatcgaaaatccggttctctaccgcacgaagctgttggatataaccagattggtcatcattccataacagttgccaatgcaaatacttttggccgttgccacgatgtatggagtagacattcttctgtaattgaacggaataccaatctaatagagctgttttataggatgcgtcgtaagtaactaaagcgctttgctcctttcccattttcacccaaagaggaatagcgacagaggtaggaggatatcccaaggcagtccacatcgttgtcaattccggattcatgccggatctcacgccttggattacgatagaggccgtactttccagacgagggatgaaatcctgctccacaaaccaacccgtacgattgttcggactttgtcccttgtccatcaaatcgatatccagcaagctattataaaaagagcgggaagcctgttgaaagatacgctgaggagtaaatcctccgtcccgcatttccttaaagatctttttcgcgttctcataacgtacataccctttgccttcatccgtacgcccctcgaaagagaaattcgtataaatcaagtaaccttccggcgccagattcggatcatttgcgtctttcttataatatcgctcattattcgtctcataataagccgcgccaccataagcatcgatcactccgaaattagcctccacatgcatcgggcgaggcaaggtatccaagaaatgctcgaaatcctgcaccgtcttacagactctcaaggcttttcgcatcaagtttccctcttgatccatctcctttatatcatcgtctttcaagttataagaagccgtattcatgatagagaagcccgtctcattgcttccggtccacacggctccctccggatcatcgctatttaccagccccagaaaacgataaccaccttcgtcaaaataaccgatatggttatacggagcgccggtatcccggtgtttccacatcaacggacggccatcgggagtagcctttccagtgattataatggaggtacaagccttgtcaaccaccggaaaacaaagacatagaacaaataaaagaagtagttttttcatatcatttattgatttaataagatttcttatgaggagcgccaaattccttacagctgacctcgtctatatctaccgtccaaatcttcacgttacggaccgccggatcgctataacggaaagtcttatcggaatattgcttcatgataatatccaaggcttccaccttcttgtcgaaatcctcttcgtaagcgacctttccccaagcgatcacgctcttcgaacgcatacggtagctacaagctacctccggatgctggaaaaccaaggcatggtcaatactaaacgtaatacagactttcggattacgttccaatatagagatgcttcgtccatcctgcgccgagtgtaaataaatcacgccatccttataaccgaaattcatcggcaatacataaggcgttccatctgtatccgccatgccaacgaagcaaacatcgctctggcggataatcgattcgatctgttccttgtccgtgtgtataagtgtcttcatattccttatgtttaaatctaacttgatgcaaaattaaaaaaatcatctgtttctgcaaccctttataacccgcactcgtctattaagaaaagaacctaaaaaattaaagacgatgaagacgagagtatcactttttatattctgcatacagatgatcgcggtttgcggattcgcagccgacaaacgtatcgatggaaatgggaacccggaaacccgggagataaagattagcgattacgacgagatcacgttcgttggctccgctgatttcgagtatgaacagtcggataaagcgccttatctatccgtaacgatcgatgagaacttatttgattacctcgtgaccgaagtagaaggcggtacgttaaagatctatccgaaatctatcaagaaaggttttaataataactcctacgacttgaggccgaccgtctacaagataaaatccaactccaaggaactaaaagagttgaatacggtaggttccggcagtttcattatcagcaaaccgacgaaagtaaaccggatggagatcaatatggccggtagtggaaacgttgagttgagaggccccgtaaaaggttacaagcttgaatgtaacatggccggtagcggaaatatcatcgccaaggatatacagctggacaacctatcttgcagcctcgccagcagcggggaaatcgaggtaataggaaccgtagatcgtgcctcattcaatgtagcgggaagtggtgagattaaagcctttgactgccaagcacgtaaagcagagtgtaatatcgccagcagcggcgagatcagcgtatatgccacgcaaatcttggatgctaatatcgtaggtagtggcgagatccattacaaaggagatccggagatcagtaagtctatcatgggttccggctcgatcaacaaagtcaaataaacatttaatacatacgaacgatgaaaacaaaattagtagcggtaatagccctcatcttttgtgccttcatggcagaggctagtaaagtagaaggaaatgggaatataattacgaaagagatatcggtagataactatagcgagatcgaactgggtggaaatatcgaatattccggcaataatttttggggaaatagaagcaacaagaaattcccggtattcaaatatacgcatggacgaagcgcttccttgaaaattacgatcgacgagaatctattcccactcctctcgatcaaatccaataacggacggttagctatccgcatacaagacgggacccgtatcaaaccgacccagtatgtaatcgaaggaagctcgaagactctgaaatacttaaagacttccggcccgatggattttgaggcgcagaacgctttttccgaggatcaactggaaatcaagatttccggctccagcgacgtaaagttcccacataacgtgaaattacgattaggtgagttctcggtatccggctccggcgatctggtttttgaagatttggactgcaagaatcttaccagcaaggtttcaggctctggagacatcaccttgaaaggtaaggcggacgaagcccgctattccgtatcgggcagtggagatataaaagcatacgacttatctgtcaatgatttgagttgctcggtaagcggtagcggagatgcccgtgtttatgccaaagataacatgaacctatcggtttcgggcagtggagacatccgctataaaggcccggcgaacgtgaataaatcaaagtccggctctggatccattcaaggcgcaaattgatcgaacacacacattttttttaatacacacattatcaaatttaaaaaagctactagatgtgatatccggtagctttttcttgctatttttgtaaccaactctttatttatagagtctaaattaaaaagtagaatcataaaaaacgatacttatgaaaacaaaggctatcttattaatggtatttttcctaggatgggtcactaccggttgggccgcagatcatgtaaaaggcgatggtaaattgacctcgaaaaagatttctgtcgccgattataacgagattaaggtggatggcgtaattgatttcaattacgagcaatccgatgatccttccaccgtggaggttaccgtagaccagaatcttcatccctatgtcaatatcgaggtgaaggatcgtgtcttaaccatcgctttcaaaggagcgaaggtagatcatttcacgaagtttatcgtaaagacgaattctaaatggcttgccgccgcaaaagtttccggaaatgccaacttcatggtaaacagtccgcttaccggagacgagaccgttattaaggcgaacgccaatagcttggtgcaactgaaagagacagttacggtcggtaaactggatttgaatgtatccggtagcgcaaatatggttgtcaatcatctggaagccgacaagatcgaatgtgatatcgatggctctggctctataacgatcaagaaaggtaatgcgaaagaaggagactacagtatcgtcagcagtggtgatatacacgcttttgggttagcggttcctcagctaagttgcaaagtaacaggcaatggcttagcggaagtacatgctaccgataatttaaaggccaacgtagtcggtaaaggaaatatccgttataaaggcccgacagcagttcaacagagaataatcggtaaaggtaccgtagaagaagtaaaagaatgaaaacaagaattatatacctatgtctgctggtgatcctctctacgacaggctgtatccctacgcaaaccataaaaggagacggcaatatcaccacggaaaacatcccggtttccgagtatgactgtcttgagttagagggaggaggcatggtcgtgaattacacgcaatccgacgctcctgaaggtttggaaataaagacagaccggaatatcttcgagaaatatgagtttaatgtagagaaccataagcttaagatccgtccgaaaaaagaattcaggaaacatacgaatttccgtccgaccgagttcatggttacggccaactcccgcaatctaaagaaactagcggcggcaggcagtacccatgtaaatataaattcccctctacaagccgaggagttcgaggcaggattagccggtagcgggattatccaattccacgacacggcctcttttacaaacctaaagatagagatcgccggtagcggagatttcgttggccataaagtgtattgtgaggaattaaacggggatatggccgggtctaacacgatcgttctagggggaaccgtaggcatagctgaattctcgatcgccggtagcggtacagtacgtgctttcgattgtaccatggatgagcttgagtgcaagattgccggtagtggagacatagaagcctttgtcgtaaacaaaatcaaggcagagatagccggtagcggttccgtaaaatacaaaggagatccccaagatatccaaaaaaaggtaatgggctccggtaagatcgagaaggtggagtgattcttacaaccacccctcctttttataccattcgatactttcttccaagcctttacgtaaaggataggccgggataaaacctaaatcatcttgaagaggcgtgacatcgcaaatccagttacgctgcttcaagatgatgtatttatcactatttagcgtcatacttttcttcaacaacttaccgatccattctgaacagtggcaagcgatacgcaccaatcccagcggtatacgggcatgcaatacccgcttctttcctaagatatcttgtatcatacgggcaaaagactcatccgtgtagacatctccgtcggctacaaaataatgccggttctctatctcctctttctcaagggaaaggaaggccacggtcgctaaatcttttacatagataaacgtgattcgctggggaatagcgcctacggcgaaatcgagtcccgactttacgctttgtatttccatgaaataatccttctcacccggcccgtatactcctgtaggccgcaagatcacgtaaggaaaataggtttgtttacggatgtagttctccgcctctagcttactttggccataagccgtgtccggccgctgcggatcgtccaagtgtatcgggcggaaagtcttctcgtcgcctcgcccatagctgcttaggctgctcatcaagaggaatttcttcggtttgcagccggcggcggctaaagcctcgataaatcgatgcgtattctcggcgttcacacggaaaaagtttcgcttatccaatgtcttcgtcaacccggcgttatggatcacataatcccatgccccatgctcacgggcaaagtctgagagttgagccgtaagcgcttcctgatcgccatatttcaagtcgatgaaatgaatccgcttatcttgcagatgcgctttactgctacccgcacggatacccgcccacgtctcatagccacggcgaagcgcctcctctaccaagaaaccgccgataaaaccactcgctccggttatcaatatcttcatatccttcatttttctttcatataaaatgtataataataccacaacaacccgatccaattcaagaacaggatcgtcagcatccaaagaatcttttgtttcttactgatgaaagggttttgcgatacggccttacatccgaacaggattacggcaatacctacgatataaccgatctccggcaagcttatccagcaaatgatttgtggtatcataaaaatagagttattcgtgaaaaagaattattcgtgttggtgtttcttcaagactcggtgcggcaagtcaccatgccccaccaactcgatcggacaagcgtatttctcgcccaaccattcctcagagacattcgctcccgggtgataatgcaaagtctcgtttacgcaagcgatatttttcaccatcgtcaaaaccgtaccgatatcatgggaaaccaagatgatagcgctctctttattgatatcttccaagagctgataaaaacgagactcgaatcgtttatccacatacgaattaggctcatccaagatcaatacctgcggacgggagacaatagaacgccccaataagacccgctgcaactggccgccggaaagctcaccgatggccctgcccgccaactcctccaatcccatctgtacgatcacctcgtctacacgctctctctgggatctattgaatggacggaacaaaggtttctccgcggataaaccggaagagatcacttcccgtaccgagatcggaaacttcttatcgatctggctcatttggggtagataaccgatcttcaaggaaggaacctctacattttcatcgtaaaaacgaatcgttccggaaataggaggcaatagacctagtatcacctttaaaagcgtcgttttcccgccgccattcggtccgataattcccaagaaatcatttttccacacatccagcgttacgttacgtaaggcgatcttattaccgtatccggcggtaacctctctcaactcaatcagcttgtccatcggctaacgattttgcgatatgaatcatttccttactccaatcgtaatccagcggattgatcgggatcagacggcaacctgtttctttagcgatcaactcggcgttcttctggtcaaactcccgctggataaacacgactttcgcattatgttcccgtgcggtctcgaccagttcctttaattgtgcgggagacggttcttttccgtccatctcgatgcaaagctgggtcaagccatattcgttagccaaataggtcagggccggatggtaaataataaatgtcttattgtcaagagaatgtaacaaaccggaaacggtcttttccgtctctccgatttctttcgtcagttgttcataattcgcttggtaatattccttattctccgggtccaaagacacaaaggcatccaaagtgttcttggcgatcaccttcgctccagagatagagctccacgtatgcggatcgacgcctccgggatgatgatggtggtggtgatcatgttcctcttcttcctcggggcttttaagtaaatcaattccttcggacaggtcaaaaaccttgagtcccggattattattccggatattatccatccaagcctgttcgaacccgatcgatccgatccttaaatagccttggcttttacccacctgcaccatttgctgcggtgtaggatcatacgtctccggactttgccctgccggaaccacacaattaatcttaaatttatctccggctatcttctccgcaaaataccgttgcggctcaatcgtcacggaaacgattctctcatctgcccgcttatcgccgcaggccataagtatcaagacgaaaagagctgatatcaataccttaaattctttcataccacatatatattttcgcaaaggtaacgaatatcgggtaataaggcagcaaggagacgattcaaagttatcaggaagcagtctgacaaaatccccgtattacaaccgataagtaataatacggggattttatagggaaaaaataggctactctatttttactcggccagccatttattcatctgtgtaaggatccgctccttcatatcctccggcatattgccgatacgggcacgatggctgcctcggggctggatatagatttgctcgttcttcttgcctttgaaagcgggaaccatggccgcgctccacgggtcgatctcgccatagatgaagatcattttcggatcgttgtctttcaagaagttatagatcttgtggtacagagccggacggaagtctactttaccgaccagttcctcgggaagcatgatacggtttaggtatccatgggcgctatcgatcgtaaggtatttcttgaaaggttttacgtcatagccataataaccgagctcacgggcagcttgtacgaagaaagagatattcggctggttctcggcgaaataatcaggaccgctgatttccatcaaatgatcgaagagcgcctgatcgtcggcagacttggaagggatcgtacttaccgaagttccccactgccaaagagcgaatgaatattccagtacgcaataatccaatacctcgggcatcgggatacggaatgtcaggtttttattcttacaatagctctccaataaaggaagcatatcggacttacgcttcaagacttccaattgaaaatcctgtatcttctcgcgttccgctttcgtacctaccttacgtaagaaaggttcgtggcggccatcctctacacctttacataacggaccgacataaggaacggagaaatccacgtcgtccgggaaaaaggcacggtaaagcattgtagtctgcccccccttactgataccggtactgatccattttcccggatagatctgcttgaatgtattgcggacgttatgtaaatcgtacgcagagttctcggcggtcagataatcccagtttttaggttccggcgtcgactccaagaaataacggtactccacgaatactaagttcgcattcaatagtttagatagttcttcttgatatttcggattgagcgcataagccgctccatatccttcggtcacgataatggtaggacgatcataacctacatggcctacgataacccgttgcgtaaatgttccggcggcggggtctttcggatcgacctgctgagtaatacgtactacatatttctccggataataatcggattgaagtttttcaatgccactaattccttttagggcggcaagcttctcttgtaaatctccgggagcggccattaccgtcatcaccgacaggaagaaaagaagcaagaagttaaatgttcttctcatggtaatttagtcttttagatattgtattgttcgtaataatccctcatatttggcgcgtttcaccgccgaatgcgcaaagatacgattataatcctcacggctcaatgccttgaggtcgtcttttttaagggagagcaaagaaggggtgggatgaaaggctgctactgccgtaggcatagcgaagcggttccaaggacaaacggcttggcaggtgtcgcatccatagatacggttacctaaaaggacggcttgctcaacagggatttctccacgatgctcaatcgtaagataagagatacatttacgggcattcaaacgtttcggcccttccaaggctccggtaggacaagcgtccaaacagcggatgcaggaaccgcagtgattctttttgggggaatcataggtatcgactaccaaagttgtcacgatctccccaaggaaaaagaaagagcctttgcccgggatgattagattcgtattctttccgatccatcccaaaccggctttccaagcccaataacgctctaacagaggggcggagtccgtgaatacacgggcctcattgttggagggatgatgctcggttatcgctttccataattggcgaagtttatcctttacgaccccgtgataatcttctccgtacgcataatacgagatataaggttccgccggattccggagaactttcggataataattcaaggctactgagataactgatttggcaccttccaccaagccatccggattgagacggatttcccgatgattctccatgtatttcattccagcatggtagccttccgcgatccattggtcaaaataagcctcctcgctcccggccttcgctacttcagcgataccgcaagcggagaagcctaattccatagctttatcttttataaactgggagatacccattattcaaaaactttaaactcgtagccttcctttaagagccattcgacagcccggggcattgcctcacgcatattgcgctcggctttcaaggaatcgtggaagacgataacggaaccattacgggtatagttctttaccacgttgaagacaccgttcggagtcatatgagggctatagtcacgggtgaccacgtcccacatcacgatatgataatggcggcgaagccatactacctgcggaaaacgcatatgcccgtgaggaggccggaataaattactgggaatatattcagccgccttctccacattcgccaaataattcttcgtccagaacttgatgccttggatatgattgaacgtatggttaccgacacggtgcccacgatctatcaccatctggaagacctcgggatgcttacgtacattatcccctaccataaaaaaggtagccttgatcccatacgtatccaatatatctaaaacccaaggggtaacctcgggaatcgggccatcgtcgaaggtgagatacacacacttcttctctgccggtattcgccaagttacccccgggaacagtgccctgtaaaaccaaggcggttgttctataaacatactttgttagtcttttgccactgatccgtacgccatacggtaattatcaaattcctcttgataaggcttagcgaactccggattgtattgtttgcttacacgcaatacctcttggagaaccgccaagttatgacctaaatcactctcgacagatgataattgccccggacgcaaacggaaataccagtttatactgcgcaacgcattgtccgctatacctttataaaccatctccgccttctccttctggcccaactcgtaatacagctcacctaaagaaagagcgctataatccaacggaacattctcgggaggcaatacttccatcgccttatccaatacgttcagtgccttctcattcttaccttccgcaaccaaagcggcagccagcttgctgaacaacgcgatacgatagctcttgcacatccgcattacattctcatccaagtacacacccggcgtattgacaccaccccatttgaacttattcatcacgttgtcatacatcttctccgtattgatcgaacgaacagttccctgtgtctccatcggaacgatctgataagccataccggtctgctggaagtacggatccaatttcacgaactgatccgggcttacggtaatcgcgtaatagatcggacggttccagtcattcgtctgcaacatatccaagataatcaactcttgcttacccaagacatccttgcctttcaagtcaatcttcatctctttctgcaaatacggcaagttagcagtatcgatcacgccagcagccataaccgcggcggaatctacccccatcgtcaatgtctgcgcaggaatataatctaattcttgattgatacccgggatcttcttaaacttcggatcgttactacgaacgaaatcaagagcggtcttcagatcaatcgatttatccgtcatcgggaatacataagcggcatcacgagtaccttgcacataatcctccggttgccaagagattggaagcggatcggattcgtatgcttgcttcttcatttggttgatataccagtcggtttgcaaatagctcgtattacatacacgtacatccgtacggataccttccacctcctgtgcgtaccacaacgggaatgtgtcattatcaccattcgtaaatatgacagcgttcggctcgcaagattccaaatagttcgcaccgaaatcacggcaaacataacggttcgagcgatcatggtcgtcccagttctgcgcacccatctggataggaaccaacaagcagagtaccgtagcgacagaacccgctatcaccggagataacttgccatacttctgcaatcctttcgccaaggccgccacaccgaaaccgatccatatacagaacgcatagaatgatccggcatacgcatagtctcgctcacgaggttgatacggcgtctggttcaagtaaagcacgatcgcgatacccgtcataaagaacaagaagaacgtgatccagaatccctgaatgcccttctttccggcataagcttggaatagaagccccaagatacccaatagaagcggtaacatataatatacgttatgccccttattgttgataatatcgaacggcatatcctcttgcgggcccactaaagcctcatcaataaacggaataccggttatccagttaccattcgagacctcaccgttaccttgtatatcgttctgccgtccggagaagttccacatgaaataacgccagtacatgaaattcagctgataagcgaagaaataacgcaaattctcggcaaatgtaggtttcatcaccgtcaccatctcaccgcaacggttgaacttcaccggtgtacctttcacttgtgcccactccttataagcagccacatgacgtccgtcgctactatacatacgggggaaaagcatactcaactcatccacgtattcgtattccgtatcgtaacgagagatataataatgatccttctcgtttttatctttcttaatgacacggctccaagtcggctcaccctctttcgatacaggtacacaagtgccgccttggttctcacgcttcacctcagagacataggtctgaccgtagatcaacggagtcttaccgtattgctcgcgagccaaataggtacgcaaggtaaagatatcttgcggagcgttttggttcataggcgtatcggctgtcgcacggatcaatgtcaaggcataggatgaataacccactacaattaccatcaagcagaccaagatcgtattcagcatcttgatatttaccttcttgctcatgaacaaataaaccgtcaaggccgccgtgaggatcacggcgatcacgtagccactaccgataaacggaatacccaacaatacgatcgagagaataaaggatatcttcatccgcaccggatggatctcgtcttgcatcgtctcccagatcgcccagatcaaggaagccgccaatataattacgaacgcatatacacccgagttatacggcataccgaacgtattgacaaacaacagctcgaaataaccgcaaacctcaaccaagccttgtacgacaccatacatcatcaagcccacgatagcgaacgacaccaataaagcgatcagcgtacccttcatcgtaggattcgggaatttcttataataatataccagcacgatagccgggatacacaataaattcagcaaatggacaccgatactcagacccatcaaataagcgatcagcacgatccaacgatcggcatgcggacgatcggcggcttcttcccatttcaggatcaaccagaataccaaggcggtaaacaaggaagaataagcatatacctcgccctccacggcgctaaaccagaaagtatcgctaaacgtataagccaaagaacctaccaaaccgcaacccatgatcgtaatcatctgtcccagagacatcgtcttatcgtcttccacgataatcttacgagccaaatgagtaatactccagaaaaggaataagatcgtcaggccgctaaagagggcggacatcgtattgaccattaccgccaccttggaagggtccgaggcgaactgcgtaaataaattggctgttaacatgaagaaaggagctccgggcggatgccctacttccaatttgtatgccgaagagataaactcaccacaatcccagaaactggcggtgggttccattgtcatcagataaacggtagaagcgatcaaaaaaacgacccaccccaacacgttgttgattagtttgtactttcccatactttgtataagtgtgataattaattgtttctacttgcatacccacacgggcagtcggccgcaaaggtaatcatttacgtttaatacctaacgttccattcccctataaattatatagaatagattagaattatattaaacaaaccttatcactcaagtgttaatagaatagttgagtattaaaattatagggagatgaaagaaaattatgaactaattgataatgaagaacgccaccaatatgaatttcatatagagcgatacgttcccagaatagagtatataaaaaataaggatggggtaatttatctcacccacactgaggttcccatggagcttggaggtaaaggaattggtagccaattggtggagaaagtgctcttggatatcgagaagaaagacttacgtctcgttccgttatgtccgttcgtagctggatatatccagaagcatccggattggaaacgcatcgtaatgagtggtatacatgtttaatatttataacaaaattatatgggcaagaagatcgaatatacgaatggtgaactcaccattatctggcaaccggagttatgtcaacatgccggtatctgtgtaaagactcttcccggtgtctataagccgaaggagagaccctggatacagatagagaacgcgacaaccgcggaattaattgcccaaatcaatcaatgtccgtctggcgcgttgacataccgaatgaataaagaggtgaaatgaggccccccccgtctgtttcatcttgatagaaaggagtattccgtatcggatactccttttttcaccataaggggctctttctatgattttttgctagttttgtgatctagattcactatcaatgaaacaaatatgataaaaagacattctatcttaacggcaatcctgctttgtttcgtcgctttcacacaagtgatggcacaagagatgcaggaacccgaaccgcttccgatcgatcctaaggttcgatacgggaaattgagtaacggattgacctactacatccgtcacaacgatcagcccaaagaccgggcagacttttacatcgcccaaaacgtaggctccatcttagaggaagagaatcaacgaggtttggctcacttcttggaacatatggcattcgacggcagtaggaacttcccgaataacgggatggacgaatatatcgagagtgtaggtatgcgcagcggggaaaacttcaacgcctatacctcctttgatgagaccgtctacatgattaccaacgcccctgtcaacaaaagcggcgtggttgattcttgcttattgatccttcacgattggtccgggttcctagccttgaccgactcggctatccagaaagaacgtggggtcatccgtgaagaatggcgtacccgacaggatgcccagactcgtctatgggagcagcaactacccaagatgtacccgggaagccgttacgcgaaccggatgccgatcggttcgatcgacgtgatcgagaacttcaagccggacgagttgcgggcttactacaaaaaatggtatcgtccggacttgcaagcgattatcgtcgtgggagacgtaaatgtagatcaagtggaggcaacgatcaaaaagatgttcgccgatgtccctgccccggtcaacccggcaaaacgggaacaagtatcggttcccgacaatgatctacctctgatctcgatcgccaaagacaaggaggcatccaatacgatcctttatatcttctataaacacgataaattacccaacgacttgaatcgtacgattgccggattggtaaaggactatatccagcaaatatgcgcgtcgatcatggacgagcgtttcgatgatatcttacatcaagcgaatcctccgtttatctatgcccaagcctacgacgatgataatttcatgatcgcgaagagcaagggagcatggaccgtagccgctcttgccaaggaaggcgagatcgattccacactgaccacgcttgtcaaagagacccaacgggtaaaacaatatggctttacgccatccgagtatgaacgggcacgcatcaacgtgttgaaacaatacgagtccgcttacaacgagcggaataaccaaaaaaacgacgcttatgttcgtgaatatgtgaatcatttcaccaacggcggttatatcccgggcattgagatggaatacacgctattgaaccagatcgcccagaatatcccggtagagcaagtcaaccaatatatccaagatatgatcggagaggataatatcgtgatcgggttaaccggaccggataaagaaggtataaaatatccgaccgaggagaacctgctccgtacattcctcaaagcacgacagatgccggtagagccttataaggaaactgtctccaacgagcctttagtcccgaccttgccgaccccgggccagatcacggagacaaagaccggccagcccttcggagcgacagtatttaccttaagcaatggtatcaaggtggtattaaagcctaccgaattcaagaaggacgagatcatcatgaccgctaccagcccgggaggaagtaccttatttggcacgaaggatattgataacttaaaagttttcaatgacgtgatcgagataggtggattgggcaatttctccgccacggatctaagtaagcgtctggccggaaagaaggtatcttgcgccctatcgctcagtcaagatagtgagaacgtgaacggaatggccgctccttccgatttgcgaaccttattcgagttaatttaccttagcttcacggctccccgcatggacgaggaggcctacgcatctttcgagacacggacaaaagcgcaattgcagaatatggagttaaatccgatggtcgctttcagcgactctttgtctaaagcggtttacggagataatcctcgtgcgtcacgtcttcgtccacaagatttcgaacatatcagttatcctcgtatcatggagatgcgcaaggaacgcttctcggatgcttccggtttcgtattcacgtttgtaggtaatatccagattgatagtatccgtccgtatatagagcagtatttagcgacattgccatctcaaggaaaaattgagaagggaaatccggcggaggttccatcgacgcgtaagggagactatatgaatcgattcaaccgctccatggaaatcccgaaagtaacggtagccaacctctataccggacagatggagtacaatctggagaatatcatcaccgctaccgcattgaaacaagttatggacttggtatattacgagaaggtacgcgagaaagaaggaggaacgtatggcgtcggtgtatccgctagaatctcacctttcccggaaggaagaacgacattacagatattcttcgatacggacccggctaagtgggagcagatgaacacgattgtccgcaatgagttgaaacggctttccgaggtaggccctcgtcaagaagatttcaagaaaacacaggataacctgctgaaacgtcatgcggaagtcttgcaggagaacagctattggttgaacgtattggatgattattattataaaggatttgataccgatacggattatgagttgattgttaaggcgttgactcccgagaagataaaggcattcgcccaaaagcttttgggacaggctaaccgggtagaagttatcatgcaaccctagttactattttgaggggatgagacggggcacaccccgtctctactttgatttctttagtttaaaatgatcgaatccttccccataaaccccgattacggcgctttgggatacaaaggcggtcggatcaatatcattaatgatacggaaaatcgtagtggattgccgttttttagcgagcacgaacatcatcttctgttcttgccccgtatataacccggtagcatcgatcaccgtaacccctcggtgcaacgcattaatctccttaccaatctcttgatacttcttcgagatgataaagaattgcacggactggcgggcactgttcacgatctgatccagcacgaaactacaaacatataacgttacgaaaccatataccactttctcccaatcctttagcacgaaataactggaggtgataataatcatatcgcagatcatcatgacccgtcccagcgttatatcccggtatttattgatgatagcggcaataatatccgttccacccgtactaccgttcgaggagaaagcgataccgataccacttccgcagaaagaggctcccagcacacatgccataaacggttgatcttgtaataaatgcatcccggctgtcagctcctggataagggacaagaaaaaagtaagcgtaaacacggcgaagatcgtcttgatactgaacttaaaacctaatattttcaaggcaagcatcagcaagacggcattaatgaggaagtaagtgtactgaacgggaaatcccgtagcccagaaaacaatggaagcgatacccggcactccacctgtcgtaatgtcattcggcaaaaggaaaacggtccatccgataccgtaaaggatcatcccaagagcgatcattaaatagtcccgtgtctcccgaagcaggacttgtctggataaggaagaaattgataaagtagatttcatctcatttgtttatttttagcgggcgcaaaggtaatgaaagttattgataggaaatgcttcaccttatatttagccggaaatataatggttcactttcccctatttacagagacgtaagcaaaagccaaggaatgttaactatttatcagtaataaccccttttatataacatcacctttatttagaaaagctctataaacgagaacatgaaggagaaagcaggcatttatacgcctttttcacacaaaaagacccgtttttcgataagaataccctcgttagattacacatatagtcccgttcacccacgcctgtacaggcgtaaacccacacatatagtcacgataggctacacatatggtcataatgggcgatatgactaccttataatgggcattgttgccccctaacgactgggccataaggcataagatatgagataggatgaattaatttcgctagaataaaaggccgtttttcaacaagtcactagcggatagacgattgctgtttttttctttcgtttttaggagacgagacgtactttggcccgaaataatcgattctcaaggacttcagtttacaaattgtcacattgatattctaaccggaacacgcataagccttttcatccaattgtagagacggggcgtgccccgtctctacaaccaagtatgtatgagctgcaaatatagacttacaatctcacattctccatttcctcacacttctcttcccgcaagcgttgaatatccttaagctggcggtcgaaaaacatgagcaagtcattgatgagccgtccgttctgggataaaagcaaaaccccatccatcaattgcgttgacaggtagcgaactttcatattacttacatgctgatcgggacgctgcagataaacggccatacatctgtacaaaattggtgctatttgtatccacggcagttttagacctaccaacagatttttaacgctttgcaactgatggttcagataatcaaggtcatccgcatctctctcaaaacagaaagcttctttcaagcgtcgtgcctcttccttaaaaaatacatcactcaacatttccatgttcgaaaccggagcgtcttgctctgaaccgacaggttcagttacggaatagatcttttcctcttccataatatattagttgtaagcaggcagaaaaaagaacggtcccgcctgacccgttgatcaacactttaccagaaagctggaggcacattaatgcactccacgggggtacggaaccgtcatatcggatcggttacaggcaaaaaaatgcctgcaaccgaatagaagcaggtattctactctgctttctggttttaaaatgttgatcacagcaaatatacttctttttccggatatccaacctataaaggataaataatgtctagtaagtaaaaaatctggagatgatacctctgtttttacaagctatgctggaacatccaagccagataatccggttcggcgaaagcgttatcccaactgttatggtctacaccgggaaattccttataacggacatcagctcctgctttcttcaatgcttcattagcgtcacgggagaattgtacatcgactacgctatcggagccgccatgataaatactgaaagccgtcttgcccttaaagtttgccaaacgttgcaaatttgctccaccacagatcggggtggcagcggcaaacaggttcgggtaacgcatcacgatatcgaacgtgcccatacctcccattgataggccggttacgtaaatgcgtttcgtatcgaccttaccttccgctatataactatccaataattccttgacggcggccatcgattgtgtggccggagcattcaacggatagaaacgctttccttcttttccggcgttcaatcccttatattcagaccaagtcttctcggccgggcattgaggcgctataatgatagccggatatttggtttgattctcgaaagaagcgaacatatcgccaccatgtattaattgggcctcattatccgaccctcgttcgcccgctccgtgcaggaacaggattaccgggtatttctgcgccggattataatctcggggatacagaacccgataattcaattgataaccatcacgagccgtaaactgctttttcaaaaaactagccttatcaccagcatatccagcaacggagagaagaaggcaaagagacagaaaaaaaatacttctaagtgttttcataatcatatattcaaatgtaaatactatctacttagatcgataacttccgcaaatataattaaatagtctgttaaggcgttgtataatatcaagattaaaattacttttgcaataataaggatataggatatgagtccaaaggctatactaataaatggatttgattaattcaaacaataattgaacatgagcgagttatcaaagacaaatggaacaaccacttcggcaaataatagagctgaggtaacacatatttcccgcaatggcttaatattgtgggtaaaggatcgggaatattatttaccttacgacaaattcccatggttcaaacgtgctgccgtagatgacgtgtttaatgtccaactattaggacgtgagcggattcgttgggatgctttagatgtagatttgagcttgtctatcatagcaaatccagataaatacccgttagtaagtaaataatcgaatattgtatgtattttgtagagacagattgtcctatctctacaaaatacatttgaaaatgataccggaagattattgggcttcctgtatttttgtcgcttctgatacaccgttctcgttgaatgcctcgatggtgaaataataaggctggtcggtggacagactctttaaaagtaattcattctttccgtataggagccatgaattgtatagtttatcgggagcgatgccccaacggatgttgtagccttggctgtttttgacagcgtcccaagtgatcatagcgtcacggcgatccgcttggcgaacgaccttgaagttcttcaccgtcgcaggtttcttgccctcaccgataccgaacacacgcaagtccgagatcgccagatgaggcgtagggacctctatgttcttataacggacataacggacacgagccggattatccacttgtacgtaatcgttcgggacatccttataattattccggcgatccaccaacgttacccaatcctgcccgtccaaagagccttccaccgcataacggtggcgtaaaccgggaatacgtccatacatattcgattgatgatcgtgataattcacttgcacggcatacaccgtagcgggagcctccagatcgatctctacccattcagtatctccattcgtgcgagccatccagaatgtcttacattcctcatccgtcaagttggccggaaggaaattggcggaagtcttgggacggttcgattccgtgaatccttgcgcggcgggagcggaaccctccgcatacgaggaagctttcaccggctttttataagaaagcaacatccaccccgtaaactctcctttctttcccggctcggcgggagcgtaatgcggataatcaccgaagttattatcacaatacataatgccctccttatcgaagaaagtaggatacatgcagaggcgacgctcccaattcaccgtagccgagagagacatagaggcgaaatgccaataattacctcccggccccaccaaggtacttccgtgtccggcaccattcatgaaaccaccgggcttatagcttaccgggttatgcgattggtatttatacggacctaatggggagtccgccacataaacaccatcggcatatacgttgaattccgtaccgggggcggcatactgcatataatatttaccgtcgtgcttggtcagccaagcaccttccatatagccccccaataccgtatcggtatggttctcgccaaaacgttcccagccatgcttcggcatatccaagccgaaaagctcgaccgtctcaccctcgatcaagaaacggtcatccttattcagtttcttgccccgaagcggataaacattggaagagccccagaataaataagcttgcccgtcatcatcgatgaataaatccgggtcttgtaggtcgtggagtatagcaggagtagcgttccaattacccgatttcggatcatcggtataaagaacgctcatggagccggacggatcacccatcacataaagcacggaatccttataattatgagcggcgggagcgttggaaccctgaggataccagtttttaccgggagtgataaaatcccagttcaacaaatctttcgaatgccagtagccatgcgaacgggttacgaacatataatactcgccccggaattctacgacagcggggtccgcacccgaacggtaagacaggttgttcgatgagttataaatcatatacgtataatccacattaagcggattacaatacgtattcgcccgcatggattgagcggtggcggaacctccggaagcagccaagaatagagcggaaaagatatattttgataatagtttcatgttgatatgtattaatttttaccgcagagagaaagaagactgattcgtctcgtcggcagaattcaagcctacccaaaccgtgaaatcacccggctcggctttcttctgcatatcgataccatagaaagccagcaaagcttcgtcaatcgtgaaagagacttgcttcttctcgcccgctttcaaagccaccttctcgaaaccttttagctctttaaccggacgggtcacgctacccgccaagtcgcggatatacatctggacgaccgtctcgccatccaccttacccgtattctctacctcagccgttaccgtgatcttgccccctttcgtgaaagagttctgatccagcttcatagagttcacggcgaaagtcgtatagctcaagccataaccgaacgggtacaacggtgtgttaggcacatccatatatctggatttataatccgtatccggagcttccggaggaaccgggcggcctgtcggtttctggttgtaatacagaggcaattgacctaccgtacgagggaaagacatcgtcaggcgagcggacggattataatcgccactgatcacatcggccataccatgacctgccatcgtacccagataccaagcctccaagataccgtcgacatgctgatcctcccaagaaagatccaaaggacgtccgttcaccaagatcaaacctagaggtttacccgtctttttcaattctttcaacaaggcttgttgagcgcccggcaatttcaagtccgtacggcaagcggcctcaccactccagttgaaatcctcgcccatagccgccaatacgatatccgcacggcgagccgtagcgatcgcctcagcgaatttagatgaatcatcagtcaagagatcacatccctcggcataaatgaacttcacgttcgtaccggcatatttctcggtcagaccctcgaacaaagagatactctcctcacgctcaccccggccggcccactcgccattctggttgatcttatcttttaccatcgggccgatcaaggctaccgtaatatgcttatccttcgagatcgggaagaagttattatcattcttcaaaaggacgatcgagcgagcggaagtctcacgagcctcttgcaagaactccggcttcatgatcgtattcttctcacgctcattgtccaagtaacgatatggatcatcgaacaagcccaagaggaacttcatctccaagatgctcgccacggcacggttgatattctcttccgagactttaccctctttcacggattgtacaagatattggttgtagatgccacccgtcatatccatatcgataccggcgttcgcagccagttccccagcctccttgtcatttcgcacgatactatgggctaccatctcattgataccggtataatcggtaaccacgaaaccattgaagccccagtccttacgtaacaaatcggtcatcaaccatttattacccgtgctgggcactccgttgatctcattgaaggaggccatgaacgtagcgactcccgcttccttagccgctaaataaggcggcatataataattcatcaatgtattttgcgacaactcggacgtattataatcacgtccggcctcagcggccccataagcggcaaagtgcttgcaacaagccaagaccgtattcacgtcggccaacgaacgccaatcgtttcctccttggaaaccctcgacacgggccttcgcgatcaagcttcccaaatacggatcctcaccggcaccttccattacacgtccccaacgggcatcccgggagatatccaccatcggggcgaacgtccaagcgataccggaagcgctcgcctcatccgccgcgatcgccgcgcttttacgcatccgctccaaatcccaagagcaggattccgccaacggcatcgggaaaatcgtacgatagccgtgcacgacatcataaccaaacaatacgggtatcttcaaacggctctcggacagagccatctcttgcattttacgtacgccatctaccgtatatacattaaacaagcttcctacaagaccttgtttcagcaaagtctcataatcccccgtcataaccgggccggtcacatcccagttacaggagtattgggccatctgccccaccttttcctccaaggtcattaaagagagcacagaatctacacggcgttcaatatttttgtcgccgctgaagcttttccagccacttacagcgggttgctggcatccacctaaggtagcggcaacggccgcaccagcgataaaagtcgttaaccttttcattattcgtatctgtattatttgttccaagtcacctgcgccgatttcacgtcccgggagttcgtacctacgtagatattgaataagcccggttcccagatgtattccaacgcgctgttataaaatttcaagtcttccggcgtaatcgtaaaagagacttttcggctctcacccggtttcaaggagatcttctggaagttcttcaactctttcatcggacgggagatgctggcagccggatcgccgatatataactgtacgacttcctcgccctctagcttgcccgtattcgtcacctgtacgctggcggtcaatacaccgttctctccttgcacactcgtcttatccagctgaagatcaccgtaagagaaagtcgtataactcaagccatagccaaacggatacaaaggatcgttcgtgatatccagatatttagaagtgaaatgatcatccggattcattgggcggcctgttttcttagcattgtaatacaaaggaatctggcctacgctacgagggaatgtagtcgtcaatttaccggaaggattcacgtcgccgaacaatacgtccaccaatccgcgagccgcggcggaacctccatgccaagcctcaacgatcgcggagaattggctatcctcccactccaaggtcaacggacggccgttcgccaagaccaacaccaccggtttaccggtctccaacaaagctctcaacagctctttctggctctccggcaaactaatatccgcacggctgcaagcctctccggaccagttattcggctcacccattacggcgatgatacgatccgcatctttcacttgctcaaccgcttccttcaccaaacgggtattctccaccggatcaaccttcaagccactggctttcgccaacatcggctcgttcgtcaaattacatcccttggcgaagatcacacgggccttattgccaaccatttccttcacagcctgcactacggaagccgacttcgccgtatcgataccacaccatgtcccgaacaactcaaccttcttatccgccaacgggcctaccacggcgatcgtccctgtctttcgcaaaggcaacaaacccttgtcattcttcaacaggacaatggatttaccggcgatatggcgagccgtattcatatgctcatccgtgaatgtattctttttcgcacgatctgcgtccaagtagcgataagggtcctcgaacaagcccaatttatattttgcctccaatacacggcggcaagcctgatcgatatccgcttgagacacacggccctcttccagcgacttcttcaaggtcgtgatatagccgttcgtcatcatatccatatccaagccggcatgcaaagccaaggccgatacggtctgcgtatcacccagaccatgattggtcatctcgccgatcgaattataatcggaaacgacaaacccattgaatccccattgatcacgaagcaaatcggtcaacaaccaacggttacccgtagccggaatcgcctccaccaaattaaaggaagacataaccgtggcacaaccagcctctacagccgctttataaggcgggaaatactcattaaacatcttgatacggctcatatccaccgtattataatcacgaccggcctcggaagcgccatacaaggcaaagtgcttcaagcaagacaagatcgtgttctcttttgtcaagtcatctccttgataacctctcaccatggcggcggcgatctttccaccccaccaagggtcctctccactaccctcggcgatacgtccccaacgagcgtcacgggcgatatccaccatcggggaatacgtccatgtcacaccgtttgagctggcctcgatagcggcgatacgggcactttgctcgatcaacgtcgtatcccagctacaagacaaagccaatgggatcgggaagatcgtatgatatccatgaatcacatccagtccgaacaaaagcggaattcctaagcgagattccttaaccgctatctcctgcaatttacggaacgtctccagctccgagcctcccgtagcacccagccagccccgacgaatcgtctcgtccgctccttccgaaccactcaagatgccgggaacacccccaccggacaagttcagctgtccgatcttctcatccaaagtcattttacccatcaactgatcgataaacgtatccatcgctctcgtatcttgaacgggcttttgtccgtatgccgcaagtgccaaacaagcggcgaatgataatataatctttctcatgttatttaaatattaagattctctcgcattatggatcgtgaaacccaatttcttcaaaccgtcctggatttccggacagctcataaacaaacgccacagaaggcccgtacggtaattctcgatcatcggggtgatcgtacattggtctatcgccagataacgacgcggataccaattctcgccttcactgaaagcgtcgtaaaaaccatacttaccccagatgctatctcccagattgaaatagaaatgcttcaatgccttcgaggattcctccggtgtatacggataactgctcaaggcggctgtcggcgtaattaccccatgatcgttggagggcatatgcgcgttatagcctttcacggaatagctggcggtcaatccccagcaagcgtcgctatatcctttgaagcccttcggattctccgcgcaataacggtaatcgatcaatacgtgattccggttcaagtcccagtagttagcgtatcgatccgacaagcctaccggacataggccgatataagaataatgcgcccaaaacaacgggccgccgtactcctcggcataattatgtttcaagatcaaaggtaaatcgtaagcgaccgcatcgctcttgatccctcctttacgagcccatccgttatgataagcggaagccgggatcggatacgtaggcgaagacgccgccaaaatataagtaatcagacattcattgtaaccttccaaagggaaattcatctcccacgcataattcgggctccaatgccaatacaatacatcctgcccgttcaaataccaagtccattccatctcacgccatagctggtcaatcttcgcggccaacgctttctcgctctcattaccatccttgaaatattggcgtacgcataagagaccttgcattaagaaagcgctctctaccaaatcgcctccgttatccttctggccgaaaggctttaccttacccgtaggtccatgcatccagtgaggccagaccccgtggaaacgatcggccttcgccaagtaatcagcgatttgatgaaaacgggccacaccttcctcacgggtgataaagccacgctcaatacctaccaacagcccggcgatgccaaaaccactacctccggtggtcacgatatcagcgtcgttctcaggatacacgccatccgtatggatacgctcacaggccagtccggaggtaggctccgcaccttcccacatataattaaaatgagccttttgtatataggtcaagaattcatcatccgactgaaaatccaacttacgctcactggccgtagactctgcggatgtgtcacttttcttggcctcatgacaagcggtcaacgaaaagccaagcaacagggtaacaacgcctgtacggaaataggtattcatagatatatacatttaaaatagttatcgtctcaatactttactcatcggtgaacgaccgctctctcccaatgcctcgatcgagaaataatagtccgtatccttatccaagcccctaaaatcgtacatcgtatctcccagtaccgtgatactgttgtacaatttatccggcgctataccataatagatattgtaagcgtacgcctcttttaccggctcccaagtgatcatcgcattccgcttatccgcttttgagcgttccacctttaagttcttaacggcggcgggagcttctcccaaaccatttccaaaaatacgaaatccggacatagcgaagttgcccgaaggcacatgttcgttcactattttcaaataacgggttttcaaaggctcacgcaactcgatatagtcgtgcggaacgtccttgtcgttatcgctcttatcgactaccaattcccaattttgtccatctatagaatgataaatacgatattgatgatacaagtccatcgccttattatgctgtacggctctatgctcgtaatagttcaactggatcgcacgtacctctttcaatccctctaaagagatctggagccattcacccggctctcccgagcgggcggaccagaaagtacgcatgctctcatccgttacattctctggtactaacgtactatccatggaagaggccatcaccggttttccatacgatagcaacatccagccggaaaacgtattcgcgatatcatctaccttccctttcggcgtaagcaaaggatagtccccgaaagcggtgttcgaatacatcacgccatccttatcgaatgccgtagggtacaaaccaatacgacgctcaaacttatatttcaaagaaagcatgcaagtagccacatgccagtaattaccatacgcatcctcgaaagtaccaccatggccggcaccttgtacgaaacctcccggcttatagctcatcgggttatgtttctggtaggtgaacgggcccatcggtttgtcggatacataaactccatccgcatagaccttgaactccgttcccggcgcaccgtattggaaataatatttaccgttatgcttggtcacgaaagctccttccgtaaaaggcgctaaagtcgtactatcgtcattgttcatcccgaaacgttcccatccgtgttcttccgggcgcagcatcatgatctcttggatcttgctgatcgggtggaaatcacggcgatccaattccactcccttcaaagcgaactcattacttgaaccatagtacatatacaaacgtccgtcatcatccagcaaaaatgccgggtcccagctaggaagagccgttttctccacataccgcttgaactttccgcttttcgggttcgtactataccaaataggcaatcccacataggtagaaccggtatagaacaaggtatctccacttacgaaagcggccggagcgcacaagtcgtcatcttccggataacgttggaaaccggcgaatacaaactcccaattactcaagtccttggaataatagaatccggcttggttcgtggcgaaaaggaaatattcccctttatacatgaccatcatcggatcggccgtagagcggaaagagccattcttcaccaaatccggcagattcgcccggaagcagtagctcaaattcatcgggttgcaataggtagagggatgatcggccgtagcgtcgaaccagcgggtggcttgctgaggagcttttacccgtacatcacgaggatcggcctccatccggatatctattttcgtatcgttatcgccaaacgtgcgataagcgtacttcatccccggataatacacgaataactcatgatcgtagcggcttgcttgtatcttataatagcctgtcgcatcggtggtataatgaaccgggctagccgtgaacatcactgtagcgccttccaagggcttgccgtccggtccggtaatcgtaccttccagaaaatgctctggggatacggtaatatagtaatcgcttacctgccctttgatcacgatcacggaatctccccgctcgtttacttgagcgtttacggtagagaccgcgaagaaagaggcaaggagtgatacgagcatacacttattgtaggcttttaaggaagcgctagaaactcctacgtctttccggaaaaacatgtacgtgttttccgaaaaagacgtacatgtttccgagaaaacacgtacatgttttttccaagaagcgatagccctatttattctattacatgccagcatattatgttcaagataagttattgttgttttttgtcgcattattattttatggattgaatcttttggatacctttctggacatccggatggctcatgaaaaggttccacaacagattcgtacggtaattctcgatcataaccgttacaggcgcttgattcaatcccataaataagggagatacccaatttacagtcaagttgaaagcatcccggaaaccgtactcaccccataagaagctgccgtggttacgataataattccgcaaggctttcatggaagcgtccggcgtataagggaaagaagccagagcgcccgtaggtgccatcgttccgttatccctgtgcggcatcggctcctgagcttgatagttccaagcgaaatcgctggcggtcaatccccaacaatcttctccataaccaacataccccccttgattctcgatacaataccgttgattgatctttgccattttctggttgttctcgaaataattcgtgtacttatccgtgaacttatgtgggtccagcccgagataggagtaatggataaagaaaagaggacctccattagagacacctactttcaagttctccccataataagtattgccattcgtatacatcttaccatcttctacacgcccccaatcggcacggtattcttgcgcatactcctcttggctggcccagccgctataatacatctccggagagattccgtatttcggccccatgatagccaacatataggtaatcatggtctcattccagccgatcaatttatgattgatcacccacgcctgatctggagaccagtgccaatatagatatgggctgtccttaaattgcttataccagctccattccacgtttttccatagattatcgatgctcttacggatttgtttctccttgtcattctcttggttgaaatattgacgagccgttaacagcccttggaataagaaagaggtctccaccaaatcacctccattatctttcgggccgaagaaagcgactgtcttcccggttgtcccatcgataaagtgagagaccgccccatggaatttatccgctttctccaagaaagaagtgattttcaagaaacgctgtacgccctcttcccgggtgataaatccccgttcgatacccaccacgatcgccatgataccgaagccggaagccccggtagcgatcatatcattccgtccgggaatattctcacgggcaagaccgctgttcggctccgctccctcccaataataacggaagttcgcttcctgtaccatatccagcaattgctcgtccgtcattggataggtagtggccgagactgtctgggaatcattggattcattcagcgcataatccacggccgtcaccttataataagcctttttaccaacctctcccaagaaatcagtataacgattcatccaagggcggcggacagcgaccggctggtaagtgatcccgtcgaaagaacggtaaatgcgatagtattttatatcctccttcgattgaggaatccatttgatatcgatatgacgctcatacgccttggcttcctgcaagaccggagcgtttaaggcacttaccgacgggagggaagccggcaaaagctctatatcgtccagataaatcgtatattcgtttccatcggccgtaccgggacgaagggctacggccgctaatttcttgatgttcgtatcgttcacggcgtttaatccgaaatccttcaaaggaatagatacggaatgccatacgccgggacgtgtatctttcagataatttctcaggtttaggtattgggtatacgtgctgtccgcataacgaatagcgatattgggaagagcggcagcattcatgctctctctcaaccgcacttgcatagagagcgtagagggctcacgaaagaagtcattgccacggaccgggcaatattgtatctcgctataccaatctccaccgggagcggatacataggtaagctccaaggaattgccgggcgtaaaagcgacagagccggcaaccggaagatgatgtctcgcatttttaatccaagagggtgaggtatatttcgcttgagaataaaagtaatcccctttcatcaagctattctcgaagaaaacatagtcgtaaggtttctccaccgcttgcaagctggcggataataagagagtagttagtaatgcgatgtgtttcatgatgctgatatttatataaataaacgatatgatttgagataaaataggcggtgccaaacgggttgacaccgccttgccaaactacaaaggtctagtaaataatgagaatcttatattactctgttacttccggctcaaaaggcacaggctcagcttctaagttaggattcaagtcaatttgatcctgtggtatcggataatattcgctttctcctttcacaaaacccggaagttcttgagtggctctgtccgtacggactaaatcgaagaaacgttcgccccattccaatgccaactcaacttgacgctcttccagaatttgatccaaagtcgcatttgcaatcggagctaaaccagcacgttcgcgaaccaagtttaatggagcgtctccattttgtcccttacgaactttagcctcagcgttcattaacaacacatcagcataacggaatacacggatattattattatcgccatatccagtacgtcccggagtcatttgattagccggtgtataagcctttccattataagcagtcggttcacccggttgagcgacaggaatataatcaccgtcacgagtagtggcatccgtcatgaggaacgttgtttccgcacgaaccgcttcaccacgtttagagaataaattacggattttctcagtcggctcaataaatgcccatccagagataggagcctctccacgaggaccttggaacgcaaaccagttgtcagaagaaacgatatcaccacttccatttccaaagtcagtaaattgatactctagcaaagactcattacacaattttcccggaatcttaaacaactcatagaagtcattatacaactcaaactttccgctattgacgatatcctcggtcaaggccaatacctcatcccattcattatcatacatcttctgtttcgctttcaacatctcagcggtatattttgtaaccgctcccggatgctcagactcattcggacgaatagccggtaagtttgctatacaataatccaactcgtcataaatgtacttctttacatcctctttcgtattcttgaatacattcagttcttgattgtctaacaaaagaggcacatcgccaaataaatttaccaactggaaataagcatatgctcggaaaaagcgaacttcagcagcatattgagcgtttaattgcttgtctgactcactcgtcaaatgtttagcataattctctaaagactccaatgctgaattagaagtagagacaacataatagcagtttccccaaaggccacttaatgcccagaaagtagtcaaacgatcatactggaatttactagcatactcatactcaatctggtccgtaggagatcctcctttattcacatcgtcaccgcgaactatgatacatccatacgaggaccaagaccccagataaccacgagcggtcgcatatacaccggaaacaggcatatacatattcgatttattcgtataatcaataccctctacctctacagtattctctggaagcttatccaagtaatcactacaactggatgtcagcaatgaaaaggctaaagggatagcccataaaatctgtttttttaatatatttttcatatacttttgattagcatttaaagattaataaataatacgaagacctaacgtataagaagatgctaaaggatatacacgctcatcaaatccataagaagaagatgctatctcacctttctcgttcttactacccaactctgggctgaagctgtttgccttgaaaacagtcaaaggacgatcagcagtcaagctcaaacgaatgctcggcatcttgaattttccaaagtctttcttcgggaatgtataagcaacttgtacattctgaatacggaaataagaaccatcttctacatagaatgagttaaagttagagatattccaaggttttacagaacctttcgcagacatatattcgttagtagagccctcacctgtccaacgattctcgaactgatctaagtcatagttcaattcagagtgccaacggcggtcaccacgtttacggtttacgatctggtttccagctacaccttgcataaccatagagaaatcgaaattcttgtaagagaatcctaagttgataccgtaattgaagttcgggatataagaacccaatgttacacggtctttattatcaatcttaccatccttattttggtcaacatacttgaaatctccgggctccaaaccatttgctacagcaatcggatcagcagcgatctctgcggcattctgataaacaccctcaatatcatatccatagtaagcattcaactcaccaccaacttgagaaatcgtacggaactccgcagaaccaccatataaataagataaaccattcaaatcttttacctcattgtgcaaggttgtcaagtttgctccaatgtagtaagagaaatctttaccgatcttatcagcccagttaaaagacaactcaacacctgtattcaaaatctcacctctgttacctaataagttaccggcacccattggcagaggagcgtcgatcacggcattttgagtcaaacgataataccagtctgcctctattgtcaaacggctattcaacgtacgaaaatctaaaccgacgttcgtctcattcacgacttcccaacctaaccaactaaaataaaccaagtttgtataaccaggaacagcgcttcctccaaatataccagaggtacccatatcttgcgtaatggaagcgaaaccatcactagccgcaaccttatcgttacctaacttaccccagctcgcacgtaatttcagataatcaacccatttctgatctttcatgaatccttcttctgaaatattccaagcagcacctacagaagggaaataaccccatttctcttggtatttggaagaaccatcagcacgcattgtagcagacaataaatatttgcctttataatcataagatacacgaccgaaccaagaaacaccacgataagtcgtaccgtcatcgccagttttacgtccatccgcattaccttgattcaaatagtaatattcctcgtgtccgcccggaacacctgtagcttctccccataggttacgccagttctcttcacgtacggattgacccaacatcgcagttaaaccatgatcaccgaacgtatctgtataggtcaatgtattatctaaaatccaactgtgataaatatcattcttcttattcaaaaggggagtcgaattcaactgagttccaccaaccaaaaattctggagtataagctcttgtctggataacattgatatcttgactataagccgttttaaagaataacttattctccggcaagaagtcgaattgcgcatagaaagaaggcattacgcgcaacattgaatttttagaatcataatactccgcttgagcaaccggattgtagtaatactcactcaaaccgatttgggcaggagaaccatatttcgtaggatacggattcaaggagctattttcatcatatacaggaataatacccggtgtacggaaagctgctaaccaaacctcgccgtttggcaagttttgcgtagagttgctcaaaacaacgttagctcctactttcaaccaatcaaaagccttataatccgctttcgtacgcaaattgaaacgagagtaatcatttttagaatccaagataccatcttgatacaaataagaggtacccacagaataagtagctttttcagtacctccagaaatgtctaaagaatggttgtgagttaaagctgtatgtaagatctcatcataccagtttgtattcggaagtgttccccaaacatttttagcgttatttacaacagcctgtaaggtttcattacccatctcactgatcatagtcgcatattgctcactattagccattttcaatacattcgtagccttttgaaagccaacataaccatcataagtaaccgtagcaggacgattcaacgcacctttctttgtcgtaaccaagactacgccattcgccgcacgtacaccataaatagaagcggcagaagcatctttcaaaatagacaaatcttgaatatcactattattcaagaaatcaatattatcaaagaacattccatctacaacatacaaaggttggctatccgtattcatagaaccgataccacgaatacgtacggaaggaccggaacctggctggccactattcgtaatctgcacacccggcacttttccttgcaaagcactcatcggagatgatgtcgcatgtttcgtaatctcatcagccttgatcacggcaattggagctgtcaaatccttagccttactcgtaccataaccgataacgacaacctcttccaagttttgcgtatcctcactcataagaacatttactacagtctgtccgttaaccggaacttcttgtgtagtcatacctacataactaaatactaaagtcgcattcttgggaacattactcaaagtatagtctccatccatagaggttatggtaccgttagtcgtacccttaaccaaaacactcaccccgatagctgggtatcctgtggccttttcagttaccacaccggtaactgtcagattctgcgcaaacattgttgtcgcggcaagtaacaggcataaacaaagcattaatttagctttcattcattctagttttaaagttgaacatttgtttttacactcattattaaatttgaagcaaatgaacacccaaacctaaaaaagggcaaatttttgtatacttcaacactactgcaagccttgcgcaagcagaaaattactacttttatactactgcaatacatattaattatcttattttcagttataatacatttgttaattcaaaaggagaacattatatgttattaaacacatctcactaaatatgggaacacaaaaatgacaaggaaaactcatagttatgattttcttatttcatagttatgatatttttcattcataactatgaaatttcttagtggaactggatcatgaaatctaccaagctttgcccctccggtagatttagttttttacgcaatcgatagcgcgccgcctcgataccacgtacggaaagattttgcatacgagccatatccttagttggcatattcaaacgtaataaagcgcataatcgtaaatcgcccggagtcaaatcgggataccgctcttttagattcgtaaagaacttttcgtggatacgatcgaaattagtctggaaaatggcccattcatcctcgcctgatatattctcttcgatcatgcggataagcttatcgaagaatcgtttcgtataacttcccgataattgttgagcttgtatttccttttttagaccttcaaggaaatcattatgagagataacagacaaagtagcactggctaattccttactcttataagtaaggtcattttctaatttttcattctctagcttgacaattaattgctcttgcgccctcaattgctcttcttgcaatctcttttgctcctcgttaacttttttctcacgcatgacaatccacatcgtatacattctcactaatacgaccagtatacataaaaacaaagcaaaatagatgatcagcgcccaccaagagctataaaatggacgttcgatcttgaatggataagacagagaagatagctcttttcctcgatcgtctttcacaaccgcatgtaacacaaaattaccatacggtaaattagaataagtccgttgaaaattactggtgccttctatccattcattatcaaacccgtccagtttataatagatcaggaaacggcgccccgtaaaatccggatacgaaaacttaaaaagaatcgtattatagctataactcaatacggacgcaccggcttccggtgcgtccgctcccttgcaagggagcggagcgaactcattttcatgccgattataggcccttacctgcgacaaacttaatggaactcgagtcgtatccacataattccggtatctgtcataacgagcgatccccccgtttagacaaaaataagacgtcccgtcggaagccacataaatatttcccctatcctctatggtcggattatcaaacaaagtaaaaggaatacgctgttttaactggaatcgcccagactcatatcctaacaatacatattccgaattccggataaaccaatataaatcattattcaaggaaacaacccgataggtatcgcttaactcgggaaaatcctcattcaacaaatcataaggaacgatctttccagtcaaatcctcataagtataaaacttactcccatccgagaaaacaatacgtccgcgtaatttcattacattaatcgtaccactctcattaccttcctccagttttccgatatactccatctctttcacgctcctcaaatcctcattcaagcgaagacgatagatacctttatacatatggctagcccatatattgccggtagggtcaacctcaaacgatttgatcaaattagagaatccttctacattatggctaaatttccaacgattagtaaccatatcccgggtgaaaacactgagtggacggtaagacatctggagtaaaacttcctttccatggataattgtcttacgtaatgcggtaccccctccattgggacccggtatctgagtagcttttcggccctctagctgtaaggtacctgtattatgtccggcaatcagttgatttccgacatcggagatataccatgtctgttcttgagtaccgggaatcaaggttggataactatcattctcagataacgcataaagaccttggttcgtagctaaataaacaatacccttctctatcaccatatcatgcaccataccaatctgggcctcaagcggttcataaaaatagatcggagaattcacatgtatctgcgcgataccattatccaatgtaacccataaattatccgaattatcagcaaatactctcaataccgtattattaatcaagccattctcccggttgatatgccacaaagtttccccctgcttattaatcgctacaaccccattagaaatcgtacccacaataaaagtagaatctttcatcatgactccccggtttgcgatcccttcctttaatatctcattggctggtgtattccacacagacaattttttacgcacctcatcatagataaaacatccactacgagccgagaccaataatagctgatgatcaaatggcaagaccgaaaccacatcatcctccaaaacctttttcgatagtaactctgtaaactggccgtcatccattcgacaaaagcttcctccctccatgaactgaacgtatagatgatcgtctaatgtgaaaatatacaatggagacaggtcggatacaccttttcttactttttccccgtcataaataaaaaagctccggaatgattgaaaataaatctcacccttatattcattaatcgtccagaactcatcattattcagatagacattcatctcagacgaactgagtgaatgataaatcagatcattctcatcatccatctcaaaatacccgaactcctcgaaagagccgacataaatacgtccgtccttcgatatatacaaagcacggacacctagattattcggtaatttcacaagatcccaatgaataccgtcaaaaaccaaaagcccccggttattcccaatatacatctttcctcccggaccttgggagacggcccaattctggtttcccgctttgtaatcgcttacggaataattgatgattttaggaatatagggtaccttcgcattccccgttatacaaaataacaaggcaataacgcaacaaatcaacatacgaaccaacgtcctcttaagtatctccttcactatatagtacagaatgttatgtaccacaaaagtaaataaaaaaacatcacgttacaccctacttcttataaactctcacataatcaatctcgaacacatgtggaaaaagagaatcatcaatacccttttggcctccccaattcccaccgatcgccagattcagcaagatatgaaagcgtttatcgtaaggccaaacctcatagcctgtcccctcgttcttaaatgtaaagtataattgatcatctacataaagccggtactcatcttcctcccattccaaggcgtacacgtgaaacgctttataacaatccgtacacgcaattttagcatttttttgagttccgatcgcatgattatatttttccgtatgcgaagaacctacgatcgtatcgggatcatagcccacattttccataatatctatttccccgctttttggccaatccccgtattcccaatccgttggaagcatccagatggccggccatgtccctcgtccggtcgggagtttcgcccgaatctcaaaacgtccgtacaaccaatccccttttcctttcgtaatcagacgagccgatgtatatgaacgaccttccatcggttctttcaaggccgtaatcctcaataccccatccgagacccaagcgttctcctttctgccggatgtataatattgagcctcgttatttccccattgatatacattaccttccgtatcataagaccatttcgtagaatcaggaaatcccgtatagtcaaactcctcactccatatcaatttccacccgcctttatccatgggtgcagacaaatcgatatcactagcattcgccagactgctcaagaaaacactatataggataaaaccaaacaaaagaaatgaccgtgacataacaatattgatttaaatcagaatttccacaaatatatgaaaaataaataaaagtgtagatgaaaaacacatcgcaaggttatccccgcaattatactgcgaataccacaggagatatacttcaagtggcagagaagatatacttcatggccaaagtaagtactaccccattttccctagggatttatcggataagctatctatacgagaaaatgtcacaaaataaaaaagggatgccacaattgacatccctctctctggattgttgagttgtctcacgaggattcgaacctcgacagacagaaccaaaaactgtagtgctaccattacaccatgagacaatccgattgctttactaaagcgatgcaaaggtaagaataaaatcttaccttgcaaattttttgattatttttttactttgcgatcaacaaataataatttttcttacctctttgaaccaataaatacttatcgtcaagcagtgaagaacaatcaattacagtgtcaacctccgctagtttctctttgttaaaacttacgccaccactttgtaccaatttacgcatctcaccttttgaagggaagatagcggctttttcagtacataaatcaacagccttgattcctgcggccaattcatcacgggagatatcgaaatgaggaacaccctcgaatacggctagtaatgtgtcctcatccaatttcaacaaagcctcgtgagtggagttaccaaacaagatattggaagcctcgacagcggcctcataatcttccaaagagtgaaccataacagtcacttctttcgccaaacgtttctgcaacggacgcaaatgaggagcggcctcttgctccgcctccaaagcggcgatctcttcttggctcaagtccgtgaagatcttgatatacttggcggcgtcagcgtcgcttacgttcaaccaaaattgatagaatttatacggagaagtatagcgacgatccaaccagatattaccggattccgtctttccgaacttaccaccgtcagccttcgtgattaacgggcaagtcaaggcataagcctcccctcccaacgtacggcggatcaattccgtaccagtcgtgatattaccccattgatcggtaccacccatctgtagacggcaaccctcatgctcatacaaatacaaataatcgtagccttgtagcaattgataggaaaactcggtgaaagacatacctacactggattcgcggctcaaacgcttcttcacagaatccttagccatcatgtaattcacggtaatatgcttaccgatatcacggataaaattcaagaaagaataacccttcatccagtcatagttgttcaccaacttagcggcattaggagcgtcggagtcaaaatcaaggaacttagccaattgtttcttgatgcaatcctgattgtgacgaagagtagcctcgtccagcaaattacgctcggcagacttcatagacgggtcaccgatcataccggtagcgccacccactaaagcgataggacgatgaccggcacgttggaaatgcttcagcatcatcacacttactaagtgtccgatatgcaaagagtctgccgttgggtcaatccccacataggccgatgtcaactctttctgcaattgctcttccgtcccgggcatcatatcagcgatcatgcccctccatcttaattcttctacaaaattcatcgtattaatttatatcgtattacattaatatatttgtcactttatctcatacgaggcaaaggtacgactttttaattgagaatcgaaaattgataattgataattatccgtttaggtggaagatagaaacgtttttagcgatttgaatccgcagcttttcttccggaatatccaacgcttccgctacattttggtagaccccgcggatatcaatcgatttatcatcggtctccaagaaaaggaaatcaggccatgcggcacgcaaagccgacggattaaaacgatctccaaaagagagataaaaccccaagcgaaccaattgggaggcaagttcaccattacctcgaaagccatggataatccaaggcatctccggtttcacggcctttttacaggcaatgagatccgcccacgcttttacgcaatggatgattaatggcttatgtgtttcctccgctaaattggcttgtgccagaaacacctctttttgcaaatccattggagattcggccagtgtatcaagtccagcctctccgatcgccacgactcccgaaccagacaccaataccctaagtagatccatctgctcctttacattatatatataccacggatgaataccatatgagcgaataaccgtatcaggaagtgaacccggctgcatatcacccattggactcacgatcctatttataatcgcgatatcctccttatggaaaggcatctgatgcgtatgtatatcataataacccatggcgttacggaaccggatcataaccgctcccaccccaaggatggcaacgaagtattcgtttaaccgcaagatacaatcctttcacagggccatatttcttcaaggcttgcaccgcatattcggaacaagtgggcgtatacctgcacgaagccggtgtcataggagagatacaatatttgtagaaataaaccggcaataagagtaatgtggtaaaaaagcgtctcattattctttatcccgaaggatatggatcgctttcttcattgccttttccatcgcagcgtacggatggatctctttatcgaggtacaggaaagcgattaacatgcccttattcttcgcttccaacggttccagtaaatcatatttacgaacccggtaagcctcacgtacctgtcgtttgatcaagttacgttttacggctctcttaaatcttttcttcggtacactcactaagaaggaagcacgggcaggcatctcttcctccatcggtaaataaacgacccgcagtggaaacgccacgaacgattgtcctttttcgaataataggtcaatgtaacgtttccacgacaggcgttcttcttttgaaagggtatacctttttgtcgtcattattttttaccgtcttgctgttttttcagatataaatccaaagcagcagtcatagaaggggcttccaccgtgggagcctcaacgtccaaacgcagacccgcatctttaacagcctttgccgtagtagggccaaaacagccgatctttatatcgtcttgtttgaaatccgggaagttcttcaataaggaagagatacccgacggactaaagaaaaccaacatatcataatcgaatttctcgtccttcgcgaaatcattgctcaccgtacggaacatcaccgctttcgtatagttgattttcttcgcatctaacaaagcgaatagatcatctttatgtacatcggaaacaggtactaggtatttctccttcgcatgtttggcgataacagtcaccaaatcatctgccttaccggtctgaccataaaaaatcttacgttttctataaacgatatacttctggagataaacagcgatcgcctctgtcatacagaaatacttcatcgtttccgggatagccacacgcaattcctcgcataaatgaaagaaatgatcgatagccgtacgagccgtaaaaataacggcggtatgatccaaaaccgagattcgttgctgcctgaactccttggaagataaaggttcaaccttgatgaacggacggaaatctatttccacaccgtatttttctgcaatatcgaaatatggtgatttctccgatgcaggcttcggttgtgataccaataattttttaatattcaatgccatagagtacttgactcgataaagttatacaaataaataatgccttcatacagaaaaactaaaggcaatatttcttggccgcaaaggtacaaactaatatataaaaaactgctatttttcctgtgaaatatccgtatggtcttataaattatcacaaaacgacacagaatatagaaaaatacaaacaacaaaacaggaatctgtatactgctccccacgaataccaaccaaagtgccggaatgtataaacagatcccccacgctcctataatagcgttataattagtcttccaaaacttgtatttcggagcatccgtaaaaacaacccccaataaataatagaaacagcgcttacaccaataaaacagtatcaataccatcattatcaacccaatagatatcaataccgtattttctagcaaatggttgaaatacccatatgccctagcgatagcaaaaaggcaaacgctacaaagaaacaaggcttgaaacgtcatgaaattccggaagagccattcgctccccctcgttacctcaaataaattttgacgttctttcacatataccacatcacgcatcatcttcaggaataaacgataattggtacggaacaccaacgcaaaacacataaataagacgaacaaaaggctgaagaccacatcgtccaccaattgtccgtcccacaaacgaatccctacatatccttcaaatgtacccatgtgccgctattatcggcacaaaggtacataattatttcaataaagcgcttccttaataatctctcctaccgtaggatgcgggaacacaaacgactttaactcatccgatttcatccccttctcaatagcgattccggcgatcacgatcaactccgaggccggattacccaacatatgggcgccgatcaacgtctcatcctccgacaagatcaacttacagacgccattacccatctcattctccgcaacaaaacgtcccgagaatgccatcggtattttcttcacggtatacgaaataccttctgcctgcaactcctcctctgtcttcccgacaccggcgatctccggattcgtataaacgacacccggaatagccttataactcatcgggcgcgatttgcccaagagatgatccacggccacctccgcctcgctaactgccgtatgcgccagtaaggagaaagcggtaatatcaccgcaagcatatacatttggcagggaagtctgcatgtactcattcaccttcaccccattacgaaaagtctccggagccagtgtctccaagccaaaacctttcgtaaccggacgacgccctacactcaaaaggaccttatcgccatgcaacgtgaatgtctccccgtctttctctacagaaacctcggttccatgcaccccggtcactttatgacttagatagaacttaatcccccgtttagcgtattccgcttgcaacatttcggacagctcgcgatccatcgggcctaatatcttatccaacatctccacgacatgtacctctaccccaaggctattgaagaaagaagcgaactccataccgatcacgcctccaccgattatcaccaaagaggccggaagctccttcgattgcaacgcctcccggctcgtccaatattccgtctccgccaatccgggtataggaggaattaccgtttccgatcccgtacagatcaaaaggttcgcagcctcgtatagctcttctccggcagcgatcgtaatcgtcccgtcggccgcacgtccttggatacaagcttccgccgtaaccatcaccacgccatgctccgtcattttcatacggataccggctgtcagctttttcacgaccttattcttacgggcgatgattttcgggagatcaaaagaaggattctccgctttcaccgcatacttggaagcatgcttgatattatcatacgtcttagcggaataaagaagcgtctttgtcggcacgcatccctcattcaaacaaaccccgcccaatgcgtttttctcaaaaagaatcgtggaaagcccaccctgcgccgctctctccgcggcagtataaccggcaggacctccaccgattatagcgacatcgtatttcatactattagatctatttaagttgtatattaggatttatctttctcaactgtttgataaaatcagcccggttggtcggagatatgagcatccaaggtttcccattgctccatatgatcagccgatccaacgaaagggcgtagctggacaccggcatcacggtagattccaacgcctctatatcagcgatagcgatcttcttctccgggaaaatactacaatgcgctatcaacacatcatcttccgttatccggtaatacgtattaaagaaaacatgaagcacccccaacgcagcgaccatcatacccactatagccgatatattggtacgcaaaaacgcagccacacaaccaattaccaccatgataatcaccagatgataccaccatcccacttttgatttatattctctttccattttccgaaatttgccgcaagttaacgaaaaacgtcaaacaaaaagaaaattgcccaatctttcctataaaagaaaatacgctgtcacttctcagcaacagcgtatccacttaaaccggttaatacaaatcataagattgtagtcgccttttttattttaattcttccaataccgtataggattgtaatacgttattcttatcatattgttccgtacgcactaagcctacattcgggctgtaccactcatagccatacccagtgattgtctcctttgatttaggggaacgtgtagcgatattatattttaccttagcgcaatcgaacgtaccggcaggagttgttatgctttccgttttaataaactcacggtccttaatggccatatccttacgattcttccggttcttcttatcgtagatctttacggaagcctcgtcgaaatacacgttattcttatcgaaattagccgcatacggatttgggtaatttataaagttctccgtgatatccacattcgtattcatttccgataccactcccggataagagagcgtctctttcgagtcgaggaaaaattctccattctggcagtatgccttgatatctcctttgttcacgatcgtaccggagggattagtatatacgtagtccgcttccacctcttggccggaaggcaatgtttccacctcatccacttgataactcataacagattgtaagtttcccttcgcgtcatatcctttacggacccataccgttccctctgtttgcggaaagaagaacgtacaatcttgcgccatcgctcctcccgcgatcaatgagattaaagccgtgtataatattttcaccttcataattttgacgtttaattaattcactactaaatacatgccggatatccaatgctttgttagaacagagtgaaccactaaatgttcagaaggtaaaaattaaaaatagccaaaatatcgtaaggcagcggtatatcatccactatcaatggataccgaatatagcatcttttacgacgatagaatcatttacatcgtacctattatataaagtcccttccatctttccctcaatatatggcatcatggacgattcatggtaacgaacactatccacatagaccttaaacggtttttttaaaggacaatattccaccttatttagtgaatccgttatccggatataagacgttatctcctcttgtgtccgaatccccttctctatattatattctccttcttgtaatgggagcaataccaccttcatcgcataacggcttgaatgttcgcgatccagtggaatcgtccaatgcgaacatctcaagacctcccattctcccctccttacttccgaataaaatccagcatctatatatctccatgaagccgacttattcctaatagaaatatcctgtccgtttaccgccccctcaaaatatcccagataatagggtgtttctttaggtgtatcctctattatctcttctttctcgcaagagataaacgccaactgcaaaagaaatagtgaaaaataaattaggtatctcataacgcatatattttagaagtaagacacttatattcagagctatttccaaagatacaaactttatccggatttcaaactaaaaagacgtagaattgaagttctataaaccaaatacacacaaatcacttcctacatatgtacgaacctctttactatacaagtttccatatattatattatcagttacatttttcttagataaattcaatccccaatgatatctaaacattaacctattctcgccttccttaaacaatggggatgatacaattacggggtagttaatctcatagactaaaccggacggtatattttgtaactgatccgattttcccttcgacaatatgaaactaggaggcattatactagaactcattcgcatagatttttcgtatatcataatcactcctcccggataaaacagcttatccttatccgatatattcttaaatcgcaagcttacccttacagtatcacccatcaaaacagtgtctcgatcagttgcaatcacaaggctcatattttctacgatattcccatccggcaataatttatcttgttctttctcaaacatcaatgactccgaataatgccattgtccactgtccttgcttcttttaagaacaaaattatagaaacttttagcggccaaatctccattttttgctgagatgaacctaaatgattttgacaattcctgtatagtattcctatcctctccatccatacctttctcccaagaagacgagctacaataaggtatcccattctcatctatcaaaaatgttataaaaaaatgggtatcctcataattaatctccgataacttctcacaaatcaaatccgcatatttaccggacgatctcatcaaaactggtgggacaccccaccatgtcactagatgattttccatccatcttccatacctatcgtaatattctttatcacaatcagaagaagtgtcttgagcaaatgcagttacactgatagacaacatcatccataaacatcctattttcaacatcttgataacattttttcgtcaatactagaaatggaatcgtacccccgcatcaaaagtcaaacgaaataagccagagtaatctcctttatcgtaagagacattctcttgcttgggtaaggaacctcctacataaccgatattcaagcccactcccacatgctttgacaaaagatattctgcgcctaatgagaaattatatcctacaccggataaggactcgcttatccccctcgccgattcccggtaactaaaatatcctatacctattttctcttccacgatccatcggtttatgatttgtttcatcacaaattgaggagcgacataagtaagccccacgttaatatctattcccgaataagtataagacgatttatatcccgaatacaataagccagcaccgaaaccgctccttgatatccaatcatacccaacttgccaatccaatccgtttttaggatggccagacccacccggtggcaaataaaatttactggtcacaaaagcgtaacctatattcgcataaatcgtgttatgctcaaatgaagacttctccacgacagcctcttcctccaaatccaaagctttcgatagaggagcggcccgaaacgccgccgtgtccgacactaaaagcatactaccggctatctgatggcaactactacccaataatgaaggtttccgatggtctgtcaacgccaatgcgttacctcccgcttttgccgtttcttgtttcgccaaccaaacaacctgatcataattacatttagtagacactccgttatccactacagaaacattgccgatcctctctgccgaggcaggaacagcctcccccagctcatacaaacgaaccttatccgcagttacgcttgccgggtaacttttagagatatttgtaatgactttgggcgcacatcctgtcattagaaacagaaaagagacaaataagacagacaaacatttaatcattttcatttttcatttataagttcaacatccactttctaaactcctcattctttctaagtacctagatttaataataaaacgtgcttagccacaaaaaattatttatcacaaaccattctatccaaaccattgaacaagcccttaccttttgctgtatgaaaccaacatatcaatatacaaaagttcaaacaaaaaataggctgtctcattttcactatgagacaacctattccttttaattatctttcaaaaccgctaccatatcattcccgataccacccgaagagcaacaccgaaaataccttgaacacaatcctccaagctcatcaactgatctcctaaatacagggatatctaaccttctattttaacagaggttttattattcaagcaatttgctcaatacgactttcttggcacaagggatatgttgcgacaaaaggctctattttctgtttcatttcggaataagaatttccataaaaatacaaggccgtgtatgcatcgctctcccaatagctatataaaccgccgattcccttcattgccaactccatttgttcaaccacatgattaatgtcacaggtttcgtagactacatcgggtaaatctgtattattaagataataagccaatccctccaaagtcccaacttccactctaaatttacgatctatccctagcaaggcagaaccattggggatacccaagcgatttagtaaatttaccaaaaaacttacatgatcccacttatcaccagctagatggatatctatatcacaacttacaatctcgccgtctggattttgaaccgtaccaccccctgttacttctcccatttgctccttctcaagtacaccttgaatcgcatcctctaattcatgtctatgcatcggttgcaaacgtgcgtttagttttaatacaacttccatattctttcacttttatgagatagatgtgagttttagatacgtctacaaatgtatacaaaatctatgattcctatacttaaaacgataaagtagattatctctccctctatttagcctgttttcatactagaagtatgctttatacctttaaggatatgatcatccataatcaaaagccacacctaaagtaccaaccctagacaggactacccagaatacccaagccataattcttcatactcatgagatgaactcgatatcagtacatatacaaaaactcaaacaaaaaataggctgtctcattttccatcacgaaacagcctatttttaaataaaccccttcttattaccgcttaaaatcaagagaataactctgcatacattttgaggtagcgctcccgaaattgcaacgctatgccttttcccatcgctccggcgcaattacaaccatgagcgtaactgcgaactccattcagattgaatatatcaccttgctttataaaattaaccataaatcacatctatctaattttctccaacactccatcatcaaatcctacagttatatacttagtatgtaataaccaagcactaaccttctccaatgaaataatgtccaataagatcgtaattacctcatttaagaacttatccggatccacatcaacaccttcaatatttagatacttatcgaccggctcataatcaacatcacaagcccaatcatcatcgtccacatcataactttcagagcctatcaaataaacacaatatccattttcagactcaaaaataccaaaattcagtgctactatattttctggtatcacttcattatggcttaattccaaaagccagtcttctatctgtttcttcatagcatttattcttttaaaaatacttcaaacatataaagcacattcgataaattaagttaacacaaaatttatttcattaaatcaacgacatccattattcgttttttatctttctctgaaaaaataaaacatacagaatgatcattaaaaccagcccaaaatgaaagagttattttaattattttcaaatacattcttaagtcatactcatctaacaatgataaatcttcatgtattattacaatatcattattagatatccagtcaaaatccctataaacttcacaaagagcatcccaattttctccaaaataattaggaaacactagagcttttgataagttaaggaataaatccattttgtctcgtactttatatacatatccaataaatgtatcctccactagatacattctaggatactttacaaaaaatatattctccatctaatagtagttttagaatacaaatgaaagaataatattatatattcacatacttataacgaacttttttcaaaatttgatttgaatcattgttccataatgatctggagtaaaccacatcttacttcctcctgtgataactctcataggccctgctcctcttgtcaaaccaggcgtaggatgaacatactctttataaacaccatttgataaatttggcaactttccttcattattataatagatcgccccatcatgacgaaacgtaaacaactttccagaccgtattctatcaatagtcggttgtaaatcatgagttaccccatctggagttgtcacaaaacgagtcgtacccgaagattgactagaagaagcgacctgagatgatgtctctaccggatttaatttaggggtattactaatatccggttgcgtcacatttagcccacttcctggagcctccatcaacctcatctccggtgccggtcttgttgccgtgttcttgaacgagaagattgtccgtccgaatttaacgtccttacctgtccagaagttattacctttcaaggcagcaaccgtaccgtttccgattccacctgtcaaggctccacccagaatacccaaaccataatccttcaagctcataaactgatccccgaaatacaacgagttacccgcactttggaccggcatcatcaccgctgtactcgccgaacctgcggcggctccagccagaaagcctccgattcccccggcggcacctccggcggcggcaaaggccaatccccccgtagcagcacctaaacctccggcggcggctccaataccaaatgcggcaaatccatctttgaaactatgaagttgacccgatacagccttatagatcaaatttgctgttcctccgataaccgcacctattataatatggataaactctccatcctcgtccacatacctcaacgggttgttcatggcatagctgtaacgattgaagttctgggacaagtccggcatctggacaaacggatcaggagcgaggaaacgacccagagccgggtcatacaggcgagcgttcatatttaccaagccaaactccttaagatgctcatggccactgtagccacgaccaaggaacaattctacctcctgccccgaagggatgtaaacgtgactggatgagttacgttggcgaccccatgcgtcaaaattataactcgcgtatttcgtccctgcctccgtgatgatatccgtgatacttcccagataatcacgacctatataataaagtttccagctattcgtatgatccttcaccaataccgccgaagcgtcgtagtaattctctcccgccaaatacaacttctccttattacccgagggagtctcatcgatctcatagcaatcccccaaataatagcgggtcaacaaacggctaccccctttagccacctgcatcttcacacgctgctgattgccgttataggtaaacgaggccacgttaccatcttgcgtaatagcgttcggacgcttgaaagaggtatagctaataacctgtgtggcggaagacataataccatttgccacgctagaggaagatatggcgtaaggcttgccacttgtattatatgcgaatgtaccactgacatcccctttggttaagatatttcctttcgcatcataagttgccataagccctttgtaggaagtcagacgattaagattatcataagagaatttctcttcttgggatacattaatgtctttccggtaagtcaagttccgtttaacaggatcaaaaacatactccatattctggaggaatgtggtcacccctgttttctgtatcttcctggaagtagggaatccataactgtcatatccataggtacgagataaggcaccggagcgtacctcggtaggtaaccccatgtcattctctttcgtgagcttaaatatggatgtttggttattcagcttggtctcaactaaatgaccattcgcataattataattctcggttgtcaaaactccggattgagacgtatacttaatagagcttacatttcctccgttataggtataatcctttcgtaaatatttattgtctaccgccgtctctgtctggctcgacagacgacccaacgcatcatatacataatcaatggaagttccgacagaagaagagaccttcgtcaactcatcgtagccattataagtatatgtagtcgtaaactctggtaaagtcgccgttttaaggcgattatacgtatcatacgtgtaattgataaccttattatttgcgttcgtctctttcaataggttgccggatgcgtcataagcataagttgtcgtaccagagctaggatcgcccaagctagtccgacggccgaaaccatcataaccaaatgaagtagtcacgttacccggtgcgacgatagaagaaggttgtccatccggacgcagattataggtaatcgttcctgctgggtctaccacagatataagattgcccaacgcatcatacgtccgcttgacagagattccatcctccaccgttgttatactattgccgctataaccatgagtcgtttttcttccggaaggttccgatatagcggttaagcgatcatacgtatcataactatagatattccaagccgtagccgaactaccggcaaacggacgagagactttttgcacccttccataactatcataaattttatccgtttttagaaaactgccattaaaacgagtctcggccgttcttacctctctattcaacgcatcatatacacttttagtagtaggtttacccgtcacagaacgggttatggcatacaaagcgtttgtcccttcctccgaccatccgtaagatacagtagcggtagtattatcagggaacgtgacacttgtctcccgaccaaatggatcatacgtatgcgccgtagactttccccggtggtccttctcagaagacatacgcccctccgtattataagaaaactcatttgcaagtcctaatgggtttgtcacctttttcaatcgaccgttcgtatcataagcatattcggtcttcagccctttatccgaaccatacaagaatagcgtctcttttgtgatattacccggagtatcataaacatactcgtaagttttcgctttatttccattcttatagaacaccttgctattcgcatagccgttcgtatgcgaaggaatattcattcgctcggtataagtactgctattacgagtagtagtcacgctctgatcggtcaagaaaccaataagatatccactctctgccgtattgttataaaatgtgttcgccttttttaccgtaatacccccagtgtaagtgatagtctcttgcgtcgcatttccataagtatcatatacaaaagcggtagtagccgtaatacccttaagcaagtcctgctctgtcttattgcttaaacgtatcttgaccgttttattggcttgaacattaacggcaaaattataggtcaatttcgcctcaggtgaaacctcactcttcaatacgccatatttataaggatcaaaatattgctccgtaagctgccctttcaaattcgtacggaatatactctcaaatcccctaaaccccaatccttggcggtgaataacaccacctcggtacgtgaaagtgaaattatcaacccggttacctttcatataagtactggaaaaggctatgacaggaatagactcttgaatgtccacatacgggaaaacagcgttcacacccttagcataagtaccggaagatatggcctcctcattcatcaacaggtatgtgttcttttcgaccactcccaaactattcgccatacccgtggccaaaacgcctttattgtcattcctcttgaatgaatattttgtaaccactccattcttcaagctgaccaattgactaaaataattatgactgtttatattagtcgggatcaagattgatttcgatgtataattttgggcacattcaaccgaacccacgttatttttcttagcgaggtaagtgaagaaaccggagctatgataccggatcaagtctgtcataccatccccgtttacatcttgtagcaaaaagccatccgtagaaatccccgagttttgagtaccggcaaacgtggatttataaaattgtccatctcccatcgagttataagcggcccacgtatagactggatccttttttttcggagataccagcaaatccataagcccatctccgttgatctcccccagcaacaacgagcgatcttttagatccaccttttttaatccggtataagtagagacttttcggcccgtccaagtactaccggaaacatcaaaagtatatatatttaccccggagtcattaataagagcgatgtcacttttcccgtctccatcataatctaataccagaagtctatctgttttctgaaatgcgtcctcaggatcaggctgctccgtgcctacaaaattaacgttatagggaaacaagtaactctgatataagaccttaccactttccaaatcaaatatatagcatttagaggtcttactggtctctccaaaaggatgatggcaagagaccgctagtacttcctgttttccatccccattgaaatcccctgtataataaaacttaggatgtatgctctttgccccatccgcatcggtcaatacggtcgggaaattaaaagtccgtgtatatttagataccaatcccacagtcaaactggccctatatacacggaaagtcacttgatcattatcaccggaaacgccattgtttacttttatgatatgctcttcttgctttccctccaaatccgcacaaaagatatcgataaaattagctccggtcgtaagattgggcatgggggaagcgtactcgctattcaatccggcataaagatagattttctcttctccggtgaatttattgtcatatctattctgggaatgctgaaaagccgtcgaatgtctgtaatgctcccaatagggattctcattaggcaaagagatcaaaccatctgcccccgacgcataatcataccttcctttcactaccttgatacgagcaggatccgttgattcataccaattatatagctgtgtgacagaaccattatcataagacccatctgttatgccttctccatagtaaagctttatagggttcagagattgcccggaggcggaataatctatctggcttaaaactgagctattgttctggtttttatagctcaagctatacatacaaagcgcagtagagcctaatttactgatgattttagccagcaagtagctttcccctgtcttaagcccccctataaaagagaccaaggggtccggtcgtgaggcttgatactgaaattccacagaggcaccattataagcaacttttgtcaatctgtaatggttttcttgctcgacataagtatataggatctgattatttcgcaagtcagacaaagaaactatcggataaaagatcttattgcttgtatttgaggcatatccaaatatgcccttggttccattaggataaaatacctcaaaatatttcacgacatcgccggacaaaaaagcttttacttttatattgccttgctcggactcataattaatagttgtcgcattctctgagatctttataagacgcatcccgtctaacacgaacgcatccgctttcgtacgtaaagctccttggggcttaccatcataataaatattcctactcgtacgcatgatcgattgcacaccgccaataccccatccaataccaacgatgccatttccttgctggctattataagccaatgataattggggttcaaatccatttatacccggataaacctgtatgggaactgtataggttttagctccagtcggggaaacacctgtttgtatcggtatctctcctacagctttcgatttatctattgtaactgtagtcggaacgtaagtattatcagatatggctttaggaacaaaagcctgaggttgctgtgaaaacctttccggattttctgcagttttcgctataaccggaggatataaagccttcaataaagaatcctcataagccttgtaatcactttccttccaatcgaaaaattgattattctcagcaactccttgggcacataaataagaagatggggacataaacatgataaatatccctatcgtatataaatatattaatttcatctataagtatacttaaattatattttgatcaatcctcctcttggtctacgggaacggcctccaaagatgaagccatcgcactaaattgccgtgttgttctatttcctgacgcatcataagtataagtaaatatcatttgttgggattgcctaatattcaaaattccgccagactttacctcaaaaggcccattaatcgtaatttgcgccggagcggaaagagataaattaccattacttgccacggttacattttggacagccaacgtattacagcccaaaactgatacacttgatgatactgtctgatttgtataagtactcacacagcttctcgtgtcaacctcttgtgatgataacggggaaaataagcaagtcaatacgatacatgtaaaaaagacgattctctctttcatatcaaagaatttatgattctgttatttctatttttaattccttgagattacagacttacatacttcttcaaagtatccgctttcttcccatccacaaacaacgtataaataaacgttccataaccaagttccgaacggcttacttctaccacattactacttccattatccaacttaataactttcacgggtttacctgtgacatcaaatatctgtagactagcagacacaaacgtcgccggtaaggtataagagacagaagcaccttccctattatataattttgcgccatccacagcacttatattacttgtggaagtcgtgttcgaacgtaattgagattgtacctccggcgatagtagagcttgcaaattatcaatcacctcattctgttgttggatcgtttgttgcatctccttgatactttctacgataagcggaataaaacctatataatctatagacatcatcccgttttcatccgtttgtacaagttcgggtaataccttttgtatgtcttgagccagaaaaccaattcgtttacgactagcctccgctgcctctcttcgatctatctctgcttggatttgtttgtctctatttatctttgcgatagtagcggcatccataatctcctctgaatcggaggaacttcccgatatcccattatccaatgtggcagagaacttagactcatcctgctccctattctcctcaagtgtagagaggttgtatgaataagagaccccattcacttgctctaaaagagctaatggattttgcagcgactctacattttccttcaagcgagcgtctgaagttatattcactccattcacacgaagattcgtattgaacacgaaattagtattactagccggattgtaatacgccacgacattgttagcataaccatttgtagtcatataaatacccaatttcccatgcaaccaaagttgatccgtatccgtggttccatattctccagcaaacacattccaaccttgattcgcatattgtccaaaatcaccaaatgttaatttcgaacctgcgcgtgcatcccctatccgaccatatatctgcatagaggttacatttcctaagtcctcattattgtcttttaaaaggcctgcttgtactcgtccatttgaaagaacccggagttgagcatttgcgtttgatactaaactaattaaaattaagaaagaaaaaagtcttgttgttttcatataagttgttctaaaatataaatagataaacattcaaataatacttctaaggaacccagtaccatatccaaacaattgcgtaaaagaggctattacggatagcgatcctacacgtaaatcacatttattgcggaacattgcgtctacaaacaataaaagggcataaataataagaggcaccagaaacaagcggcaaaagaatgagccgataaccaatagacagactgaaaacgtgaataatgccggtaaacaatgtaccagcttcaatgagccgggatgtttccggttcaatgcgatccgggcctctccggaatgtcgcacctgacgaaagaactgcatgagatccgtccgccttttatgataaacccatgctgaaggaaatagccgggtccgataaccagcctccatgatccgtatgctaaaatcaatgtcctcaccatatcgcatgccggaaaaaccgcccagacgctcatatacatcccgccttattcccatattaaaactacggggataaaatttatccaactttttcttcccgccgcggataccaccggtcgtcaggaatgaggtcatggcgtaattgatcgccttctggatcggggaaaacgaggcatgcgccttatccgggccaccgaacgcatccaccggataatgattcaacgagtcgtgtatatgctcaagccacgtggagggtagtaccacgtcagaatccagtatgagcagatactcgccacgcgcttgcctagcgccatgattacgcgccatacccgggccggagttcgagatcacataataatgaagatccaaccgcccttggtatcgcccaacaatctctttcgccggtatctccgaaccatcctccaccacgataacctcaaaatggacataggtttgcttgcaaaggcttgataacaggtcatcaagctcatccggcctgttataaacaggaattataatggagtataaacgcatatcttttgtataaaagtctagcacaaatgtagactcattttcatacatagtcaaggaacacacatggacaaatcaagaccagacaccactgataatcaacaaattaaaaacaaacatatggacatcccctgtttttagtactctttgagatattgatctagcaagaagcttacgtcggaaggtatttgtttactttttttgatacgctgtttgatacgctgtttctgtttggatacagactcggggagagagttcgcaaaaacagctatttgggaagaactgaaccccatcttgatcaagcagcaatatcgcttatctaattcagagaaatcgggaaaatctttctctaaccgtgtatagaactgatggtattgcaagtttgtccagtttatgattaatgaccaatctgcatccttcagatatctaggatgctcttttaggtctttcaatttatcgaaataaggcaattgctcatctagtttcttatatgaggatttcagtagctcttcatatttctctatctctttatgggactccgcattttgatccaataaacttttattctctgaaacaatctcatcgatttcctgctgtttattatttaacgtggccatcaattgctcattttcctttatacgattctcattctcttttatcgattccttgtaaattcgtatttgctctctagcatgcgctaaagatttttccttccgcaatacacgatattgatagacgattataagaatcaacagaaccgcagtgacaaacaagccgattatctcttgattcgttttttctagttttagctggttatttatgttcaacaatctctcatgatcataccgagcctgaatttcagccaattctccagcatgatttattacctgtagcgaatctgagtaaataagatattggttattatattctatggcctccttgtaaagtttttgttctacacatatataatataacacctcataggcttcatttagcgtatacaaattgtctgtttctaacgatttctgaaagtaaacctttgcagagtctagttgccccaaactccaaaaagcactacctatcttgtaatatacttgaggaagcttatgtaaggaagatatttgtaaacataagtcaagctcttttctagtgtaatgtaaagctttttctccttgacttaatttattataaacaacgcctagctctcccatagccatagcttcgagctctatattacctaacctttgagcattatctaatgatttaccaaaatagaacaaggcactatccatttcatttttatgcacataagttcttcctagttctgatagagcataagatatccgttctccatttcctgatcgtaatgcgtattgataagcatcctttaattgtaccaacgattcttcataaagatcttgataacgatacatatttcccaatgattggcaaatcagataagtaaaaagcggctcatccaactttgtcatcatttctttagattttagaaagaaaggcatcgcttccgttatttttttctgatccttcaataactgtcccttataataatacgtttgcgccattcttttcaaatctccctccttctcgaaataatccatcgcatcttgaaccaacttatccgaggaagggatattcaacgaatccggaaggcgtttaccatataccttatcccgggcttgtgccaacaatagcgcccaagtagcatagttctttccgatagagagtgatgattgaggcatagaacgtaatatagataatgcgctatccggatgctcccacatcacagattccgcacgagataattccgcaggtaatggtttttcttggcgcatacaagaaaaaagggtagcgaaaagtagcaaagtcagtcctagtgttctcttcatttagattacagtttacaacttaaacgcaagttataaaatttattttataaataccactaaaatatttgtttttcaatagtgattttgagatacgatcagccagcaaggagacgcggcacactacgtatctactagttatattatgtatttaaaatattagcatataatcatttgcagttttttatggtaaaaaacaaaagtttatcaagcagaaaacttttgtttccctatatagaaactaaagtttcttcagcacgaaacttttgttttccctaatagaaactacttttacatatataggcactacgacacacgaacctaaacgataatttgatttcttgcgttttctatcaaaacatggtagataaagaatgataattgtagatattttctatctacaaccactatataagatgtttatttataaggcatataagaaggaattgtagatgtggtagatattaagtgttttttattaactggtaatttatggaactcgattatataatccaacaagttcttgtaactttgcagccattttaattgaaatcccgattgaatatgaagaacaaatacgaggctaggctaggtacggaacgtatgctaccgctggttttcaaaatggcgcttccggcggtagcggcccaatttgtcaacttactttataatatcgtagatcgtatctatatcgggcatattcccgagatcgggacaaacgctttggccggtataggggtgaccacctccatcgtgatcttgatctcttctttctccgctatcgtgggagcgggcggttcgccgttagcggctatcgctctcgggcagggcgaccgggaacgggccggaaaaatagtgggaaatggatttatattgcttatcctatttactatattcacttccctcatcacctataccttcatggaaccgatcctgctttttacaggagcatcaaaatatacgttaggatatgcggtggattatctctctatttatttactgggcactctgtttgtcgagatatccacgggcttgaatgcctttatcaacgcgcaagggcgtccgtctatcgctatgtgctcggttttgatcggggctttattgaatatcgtattagaccctatcttcattttctggttggatatgggggtaaaaggcgccgcgctcgccacgatcctatcgcaagcttgcagtgccatatgggtattgagcttccttttctcaagacgtgcctccttgcctttggaaaggcggtatatgagactggaccgaagaatcgtactctcgatgttcgctttgggaatttctccgttcatcatggccagcacggagagtctggtcggtttcgtcttgaatagtagtttgaaaaattttggcgatatctatgtgagcgcattggctatcttacagagtgccatgcaattcgctagcgtaccgctgaccggtttcgcccaaggattcgtaccgatcataagctataattacggacatggagacaaacagcgggtaaaagattgttttcgtatcgtgctaatcgttatgttctctttcaacttgatactcatgctattcatgatcttattcccctcaaccgtagcctccgcttttacaagcgacgaggagttgatcgataccgtccgttgggtcatgcccatcttcttggcgggtatgacgatttttggcttacaacgagcttgccagaatatgttcgtagcgttgggacaagctaagatatctatctttatcgccttgcttcgtaaagtaatcctcttgattcctttggcattactattacctcattttatgggggtaaccggcgtatacgcggcagaagccgtatcggatgccacggccgctatttgctgtacgttgttatttatatggaaattcccgaagatactagggaaaatcaagaaaaaagaagaaagggctgcccaataacggacagccccctgataaagccttaaagattaaaatgaatcgtattaatatcccggattctgtgtcaagttaggattcaggctaaggatatcggcatagatggagaataccgttgtatatcccgtcttatcctcttgataatccagtgagctggcggaatgtttcacgcctacatagcggtctaccgtagcctcggtaaacttgccgaaacggatcaaatcctgccggcgtacgccttcccaagccaactcaagcatacgctcgtctaatagcgtatccagcgttacgttttgtagcggtttggcgcctacacggttgcgaacttggttcacctcatcgtctccattctgtcccagacgaatcttggcttccgccttcatcagcaacgcgtcggcgaaacggaagatcacgcagtcatttccatgcaagtttccaccatcctgagcattctggtcgaactcatatttagccatacgagctccggcggtcttcaccaacaaaccatcggaggcatccatatataccttcggggcgttcggctcatatttcaaaggaactttctgtccgtcccattccgtatagatcgtctttccgtccggaccggttacctcgcccgtaaaataagtaagcttacaacgaggatcctcatccgccgtaccgaacttaaacacgttcatcgccttcaccgtagcgcaagagccattccatccggattggccgtaagcggttgcatgatcataatggcgggtacgtaccaaattgtagtcctttgcgtccggataagcgaccgggtccataggaaccgtgaaaatattctcaaccgaggtctcgttcgctacggcgaaattctccgagaagtttccctgcaatttatagcccaaagcctccagcttatccacataggcgatcgtagcttcccaagcgttcatctctttaccgccaacggtaaacttgatgttctttccatccggacgattgccgtccgtccaattgtcgtccgcataaacctccgcgttcaacgccaacttagccaagatcatataagccaccggcttggtaatacgcccgtaatactcgcccttttggttactgcggttatctgaaagataaggcaacgcctcctccaactccgaacggacaaagttaaatacaacgctacgctcagattgctttacctcagacatcggtgtcgtagaggaagttaccaacggaacacgagcgaacaaatccaacaactcataatagaaaaacgcacggaccgcacggacctcttccagataaaccttgaaatattccacgtccggttgttcctcggcaaaggcttgcaacttatcaacactctggttgcattttccaatctgctcatacaagaaatcccaagagttcttggtcaaatcattcatcgtgccccaacggtgtaagaaaatattctgccataaaccgccatcttcccagtcgccaatacggcaaggaagcatagcctcatcgctggagaaagtattcaagtcatatacatgacggtcgttacccatgatcttgaacatattattgtacaggctcgcaaccgtgtttacatagaccaacgtagggctttggaacgcggtctcctcatcaaacgcatccgtaggacgctcttccaaaaaattagaacaggaagaaaatgccgcggcggcagcggctatcataaagctatatataaatttctttttcatgactctttaaatggatttagaagttaacactcaaacctaatgaatacgtacgggataacggatagaaacgtttgttatccatacctaggtcattattatctttatcgaccgtcgtactgttaatcatcggagacaaaccggagtaacccgtgatcgtagctacgttgttcaccgagaatgtcacacggatattcttcacgtatttctcgatcttcttgcaatcgatgttgtaacccaacgtaatataatcgatattcaaataattacccttctccaaccaataatcggagatcgactggtcgtagatcttgctttccggagcctcagccaacgcgttgtatgtagggaactgactcaggttcatataagctagcgatgtaccattgaagatcttatgaccgaaagcgccgttcatctgcgtcatcaagtcgaagcgtttgtagcggaagctgaagttcattcccagataatatttcggcatggcttgtccggcgatataacggtcgccaccatcattggtatccaaaccctcttttccatcgatcgtctgatccaagttatagacataacggccttcgatagcgtttccattctcatccaaagccggagtcaagcccaagcaacgaggaatgtagaacactccgacaggctggcctaccatctgataaaccacacggttgtttcctacgaaaccggcaccactcatactggacagatccatatattgtttcgcctgcaactcttgtcccatataagaaccgctcaaggagttcaatttattcttctggtaagagaaattcacgcccatgttgaaatcgaagtcctttgtcttcacgataccaccgcttacagccaattccacgccggagttggtcatctctcccaagttcgccaataattccggatatacgaacggaggaaccggaaccgcgtatttatacaacagatccgtagtcttggaagtataccaatcggcggtcaacgtaaagcggccatcgaggataccagcgtccacacccacatcgaatgtctctttcacctcccaacgcaagtccgggttcgagttacgtgtaaagccataggtagcggtagaatttccattgacggaagtcacaccgttcgggctcatcaaagccaacgagttataagcctcgatagcatcttggttaccagtcagaccataacccgcacgtagtttcaactggctcagccaatccacgtctttcaagaaagcctcctcattcaacacccaagcggcggaagcggaagggaagaagccccatttattattcatacccaatttagaggaaccgtccgcacgtaagttcacggtggcgataaaacggttgtcatacatataattgaaacgacccatgaatgaggccagacgattctcgttttggaaagaagtcacgtctccgtatttcactgtaccacccgctttcaggttgttataaccgaagtaatccgtctcaaagccacgggcaccggcgctaaatcccgtataatgatatttttgtcccctctcccagacaataaatggattcaatcgttacgctgctatttctcggtaaataatgtatttacacttaccggatataccggaggcgatcccgctaatatcaacgtgaatggcgtagaacccggtatcgagaccacttccatctatcctgtagcccgtaccttcacgctgggattatccgtccaattctaaagacctccactgcaagccgggttgcagtaacacaacccgcaaggctctatccggaaaacctgtagtctatatttattttgtacgaaaagcaagcgcaaaaggaacaacctaatcagttaatccctaactttgtgagcctaaacagtagaaaacatggtacaaagattcgattacttagtgataggctcaggaatcgccggtatgagtttcgctctgaaagtagccaatgaaggcaagagcgtagcacttatctgtaaagccggacaagaagaagccaacacatatttcgcgcaaggaggtatcgcttccgtaaccaacttgaaagtagataatttcgagaagcacatagaagacacgatgatcgccggcgactggatcagtgaccgggcagccgtggagaaagtcgtgcgcgaggcccctgcccagatcgaggcgcttatccgatggggagttaatttcgataagaaagaaagcggagaattcgatctgcataaagaaggaggacactccgagtttcgtatcctgcaccatgccgacaatacaggagccgagatacagacgagcttgatagaaacggtaaacaaccatcccaacatcgccgtattcacgaaccattatgcggtagagattatcacccagcaccatatgggcattatcgtcacccgccatacccccggtatcaaatgtttcggtgcctatgtattgaacgaggatacgggcgaggtacatactttcttgtcaaagataaccgttatggcgacaggcggttgcgaggccgtttaccggaatacgacaaacccgctggtagctaccggagacggtatcgccatggtttaccgtgcgaaaggctccgtaaaagatatggagttcatccagttccacccgaccgccttgtatcatccgggcgatcgtccctctttcctcatcaccgaggcgatgcgcggatatggagctgtattgagaaaccttggcggagaggagttcatgcataaatatgatccccgtctttccttggctccccgtgatatcgtagcccgtgcgatcgatagcgagatgaaacaacggggtgaagaccatgtctatttggacgtgacgcacaaagatccggaagagacgaagaaacatttccccaatatctataaaaaatgcctcagcttagggatcgatatcacgaaagattacatcccggtagcccctgccgcccattatttatgcggaggtatcaaggtagacttaaacgggcaatccagcatccgccggctatacgcaatcggagaatgttcttgtaccggcttgcacggtggtaaccgattggcctcaaactcattgatcgaggcagttgtatatgccgatgccgcggcgaaacactcattaagcgtcatggatcgctatgagttcaaccaggatgtaccggaatggaacgatgagggaacgatcaccaatgaagagcgtgtattgatcacccaaagcatgaaagaggtaaaccagatcatggaagcgtatgtaggtatcgttcgtagtaacacacgtttgatccgtgcgtggaaccgtttggatattttatatgaggagacagagagccttttcaaacgttgtaaggcatcccgtgaattatgtgagttgcgtaatatgatcaatgtaggttatttgatcactcgtcaagcgatggaacggaaagagagccggggattacattatacgattgattacccaccgattaaataattgaaaattgagaattgagaattactagctatgttaattctcaattctcaacttttaattatcaatagttctgtttcatcggttcaaagtaagcttgcggatgagcgcatgccggacaattaaccggagccttcttaccctcgaatacgaaaccacagttacggcattgccagaagatagcctcatctttctcgaatactttaccttcctctacgttagccaacaatttacgataacgtttctcgtgttcagcctctacctttgcgatcatcttgaaagctacggcaatagcgggaaaaccttcttcctccgcaatcttagcgaactcaggatacaattcagcccactcctcattctcaccagctgccgcggctgccaagttctcagcggttgttccgattacgcctgcaggataagaagcggtaatctcaaccattccaccttccaagaatttaaagaaacgtttagcgtgttccttctcttgctcggctgtttccatgaaaacacctgcgatttgctcgtaaccttctttcttggctacgctagcgaaaaatgtgtaacgacttcttgcctgagattctccggcgaatgatttcaataaattctgctcggtacgtgtacctttaatacttttttccataatgctaattttatgtagtaaattaatgagtctgttttgtatatcgtttttctcatgaccgatcaaaagtaagaatttgtttccagatatcgattacgcagacattaaataatatctatctctcaatagatatcacttatttatcaaggaaaaacttctcctcctttatacaatgaaacaacaaatcctcctaaattgtttacacaaaaccggaatgcgtctttagattttttgcatcttctttattttattaactttgcatcctcaaatcaaacaggcaagaagaaaaatgaagaacaaatttgattttcagcccaaactctttacggcgctgagaaattattccaaagagagattcatgacggatctcatggcgggtataattgtcggcatagttgccctaccactcgccatcgcttttggtatcgcctccggggtaagtccggagaaaggattgatcacggctattatcggtggattcattgtctcccttttaggaggctgcaacgtacagatcggcggacctaccggagcgtttatcgtgatcgtttatggcattatacagaacttcggtatcgaagggcttgccatcgctaccgtcatagcgggtattattctggtattgatgggcgtgctgaagctcggtaccgtgattaagtttatcccctacccgattgtcgtaggtttcacgagtggtatcgctatcactatcttcacgacacaaatgaaagacttatttggattgactatggataaagtccccgccgatttcatctctaaatggatcgcatatttcggggcgttcgatacggttaacccttgggcattcgttatcggtatcattagtatcctgatcattacgttaagcccgaggctaacgaagaaaattccgggttccttgatcgctatcgtcatcatgacgatcgttgtttacattatgcgtaatcatttgggtattacaggtatcgagacgattggagaccggtttactattaacgcttccttgccagccccggctccgatcacgtttaatatggagacaatcaacttattgcttccctccgcctttacgatcgctatccttggggctatcgagtctttattatccgctacggtagcggatggtgtgacaggcgacaagcataattcaaatacggaactaatcgcccaaggtgcggcgaatatcatcgttcctatttttggcggtattcccgtgaccggcgccatcgcccgtacaatgaccaatataaataatggtggacgaactccggttgccggtattattcacgccatcgtattattattgattttgcttttcctcggaccgcttaccaaacacattccaatggcttgtctggctggcgtattgatcatcgtatcctataatatgagtgagtggcgtacgttccgttccttgatgaaaaacccgaaaagcgacgtatccgtcttgttggtgactttcttcctgacggttatctttgatcttacgatcgctatcgagatcggccttctgatcgccatgttattttttatgcgccgtgtggctgagaccacgcatgtatccgtcaccacggatgagatcgatctttccgacgagggcgagattcatcatgacgaggaagtcctctccctgcctaaaggtgtagaggtatacgagatcgatggtccgttctttttcggcgtagcgaataagttcgacggcatcatgaaaagtatgggagataaaccgaaagtccgcatcatccgtatgcgtaaggtttcgttcatagattctaccggtctgcataacttggaaagtcttttccgtctttccgaggcagagcatatccatatgatactttccggggtcaatgaacatgtacaccgtgtattgacaaaatccggattcgataagaagattggcgcagaaaatatttgcagtaatatcaatgaggcggtagagaaagcgaaagctgccgtacaagactaagatactatcagacagtgggagacgcagcatgctgcgtctctacaactggatatttattccggtaaataataccagtcctctggtaagacagcttcctttattttacggctggaaaccccgacctccaaggcctcgcccatataatcctcgaaatacaaaacacgtaattcgtggaaaccagcgtctaacgctacctttcctttcgctatacgagcattatgagagccatcattatcaacaatagctttaccgtctataaatagcttggaaccatcatccgaatacgtataaaagcgatatacacctttttcagggatatttatcaacgtacggaactcataagcgaaatgatccttggccggagcctcctgaatggagatatttttcatcgtaccctctttcacttttgtcccggaagcgatctgatccgtatgtttaaacttgccttcataataggtataagctaccccgtgctttttaggttttaccgttttggcgggtaagaattccatcgtttcctcatccttagaggtcaggccagacggataataatacgtatattcctttccggacgaggtacgaatccatgaatcaaactcaaacttgccctcacgcaattcaatgatacggccaccccgctcgaaatctccataagcgtcccatccggatacacgcccgaaagctagccccacgttatataacattcctatataatcgttatcatgatcgtgcccggcgaaagtagccatcacatccttcatttccaccaaggaagcgaagaagcccgtgttgatcttaggagaggcgattccctcttctttctgtcctaatgtagtctccgccccaacgatctcattatattccaacagaggaatatggaaaaaagccaaggctggcaacggtttgccgccattttccttggtatagcgcatactttgctcacgataccaatggatctggtcgaaatgaatccaatcatacgtgccataatccttcagcgtaggataatcgttggagtcgatacaatacaataaggccgccggtttctttccgtccgaactgtagaccggtaccacatagtttccggctccatggatatcacccggtcccttctcgcccataaaataaggtgatttactaagcatggcataaatctcgtccttgggaacgatctctgcgtcatgatttcccatcatcaccgtaaacggtatcttggcctcctcaaagatcccgatcactgacttccatccttccaaaccgggatttgctgtcaccacgtcgcccgtcagcatcgccacatccggattttccgcctttaatacggattgtatcgtagcgactgtcttagcgcatttagatgatttctgatcccaatgaatgtctgtaaattggacgatcttgaatttcccatccttgaaagcaagctgtttttgtgcgaataagctcatcggggcacaaaagcacaacaaggctatcgctaataaaaaagtctttttcatgttcttcgatttagtaattgggggctaagttataaaaaaaagagagcgatgtataaaaacaggctctcttccttatgttaaatgccacaatgaaacccttgctgtcaaacaaaagctatatacatatccgcaagccgggttttcctgtcaaaatgcgggatctcttttactattttctcacaatcctcaaggctcattcctcctttaggttccccccagtaccaaagtttaggggtattctgttttttacttgttgactccataattctcgttgtttttatcgtaagacaggaaacgctcaaatacccctatcctcaaaatatataaaagattaaaataatgtgaatttatatccaaccgacaaccccaatttcaaatcccggtcattgacacaattctggaaatagttcactcccacataaaatctttttacctctataccggccgccgccgtagctcccagattccaatattcaccactaccggtgtaagcacccgcatttaatcggagattcactttatcgctcaacggaatatgaaaagaagcatacacgggtacaaaaaaatcaatattccaatcatctccatatgaaaacgaattccctgcggtatgcagcaacaatcccgtttgtatagaaaacaaccgtgattgcggaaagtttatatacgccccggtttgaagtccccatccatctcctcctaatataccggtacgagcctctatatcagttgcctgcgatcggccaaaaaataaaagcaatatcaacagaacaaataacttcttcattacttacaaggtattaaaattaatatttagactgaataaaagttcgacatatcatgatatagaactcccattcaatctaaatattgcttctatatcattattcggctccaagttagtgtattccgaatatagcgtcttttatgacgatcgaatcttccgaattctctatattatataaaataccttccatcttcccttcaatataaggggtaccacttccctcatgaaaacgaatactatccacttgtatccgaaatgaagatttcagtggatgatacactattttagcgtcatctttcgtgatcctaacagtagattctatctcttcattcaataatttacccttatcgatcagatattctccttctctcaatggaatcaatgagatcctcagcataggataaggatagtcagagatatgcactcctaatggtatctcccaatagaaaccgcttaaatcggtatttacctcctgccaaaaatttccatgatcaatgaaagaatgagagttcgactgattagctatagaaatatcttgactattcacctttccttcaaagtaccccaaatagtaaggagtttcttcaaaagaagtatcctcatccttgtcacaagaaacgaatgagaatagtaaaagaatgaataaagaaaagatgaaacctgccatcattccttttttagcttcatcccagtaaagcatagagatattccgtttttcagttgttgattccataatgactattgttttcttataagacaggaaaccatcaaatacccctatcctcaatgtatataaaagatcacaataaagtaaaccgtattttattatttctattttacacaaaaagacattaattatatttttacatatagcctattacaatatattcactacatttgaaatattaatcaacataaaatataagccatgcaaaaatcatcatttaataaacttagcattttactatttattatagtaattctatcttcttgtaataaagataatggcatagaagagattagtgaatcatatattgaaataaaagtgcttagaattagcaaagataacacaaaaacacctatttataatgcaatagcatacatttattatgatatagcacctattgatctcgcaaattacacagataaagggaatggtatatactctaatggtaaaaatacaattatacctaatcaagtaaaaagaacaaatatagatggctatctagaaataaaaccagaagaaactattcattctattacagttttcatccatgacactaatagtaatatgatttctcactcatattggtcaaaccgtcaaaatcaaataaaagaaactattacattttattactaattatatttaagatatgaagtaaatagtttataaataactatttacttcatatttagcttattcatataagcatatccattaatacattttcaaaggagccaactctattttataataaccattataatatttactatttaatggaattgaatatgccgtatctctacgtcctgcatattcaatccaatcaccagaaagaacaacaggatcataaaaattaacaataacatcccccaattcatcattacccaatgtaaatgttttttcaaatgtagtcgtaattgtctttttcgcacttgcaccaaatttcaatcctactttttcaaaaactccttttacaggattaagttcaaaatttcctgcaaattcagcagtagtttggctaagcgtcctttgagtttctgtaccatcaatttcttctatagaaatttttattacacaactaaaattttctatattccattcaaacagaggtaaatcaagaggaacaactaggcattcttttacaccatcaactttagaattacctcctcctatatctttgtaagatactctaaatagatcttctggttttacgccaaaagaaaaagtttgttctgtccctataggactttttgttccaacatatactttaactaaaaaatcaaatttaccatcagtccaaggagtagctttataagattgcctaggattaaatatttgatcataatctaactgtgcatctcctgtttgatctgatatcttttggaaagctatatttggatcccctttcatttggaaagaatatagtgtttctttataatcataaacaaatacacctttatctgaacctggaaccatatcataatatatatagtccctatgccatccatccttatttttataaatattatatgcatcaactgatttttgtaatctatctttcatacttttatttacatttcgagatcttaaaatgtttttttgtttcatattattaaaagattctccaagaaaagaataagttattcccgatttagaagaaaaagtaaaattagtactactaaaattacttctagacaaattactatattcattcgctacgattctttcattatcctttaatacaacaataggatacataggaatgagatctgattttataattttttcttccccatccttatcatatataggaacatcgttactgatacaagttctaacagcaacaactggtatttctttatcagtattccaaagagcagcagagaacgaattcttaggtaattctggaacaaaaattgttagagtaggaaacttttcattaatagataataatttatccatttcaatatatttccctatatactgttcaaatgtaatattatcttccagcatctcatcttttactaattgataaagaacatcataatcattatcaatcatttttaaagcctcgtttttaatcaaatttctagccattaggctttcattaaaaacttttgataatgctttagcaaaatcttttttcaaaactaagtctttattcattagaagagaatcatgaatagaaatttctatattatttgtagataatatatcatttctttccatcactaaatcatcattacaagatgatataaaaactaagcaaataaataataaatacacctttttcataatactactttttaaaaggtaaaacaatagaaaattatatttttactcctatatcatttacaaatacaaaagtttaaatttaaaaatccccaaatacatgattataatcattcattatatgtaatactcctttttcttgatctcttacttttagaggtattactaaatatggcatagtactcgtttgtaccttttcattatagatcacttctcccgtagaactagtgacgataacacatacatcaccaagatcctcgtgaaagtttactatcagttctctattagcctcctcaatcgatgcatccattggcaaacctattggaatggattttttcttatgttcccatttaccatgtagatctataggcttaccccagcatggcatagcccataataaagctattgccgctaataacaatttaagctgtctcatttcgtttttattttttcaacgtaaagatcaagcctatagaagaaacaagcaaatataacgctaaataataagcgacaaacgaaattcataatcaactaatatttaattgattataaatcaactagcaggacaaagggtaaagccaatattaatagaagctattgtttatcaatctattgtacactattaataagataagcacataaatcaagctctttcgctatgattcccagcctttggcgtacacgctgccgacgcttgtttaccgaatccggctggatatgtaacaggatagattcacctatcgaatccaaacccaacaagctcaaataacaataacgcaattcggcggcagataaattaaacgcagcgagtcgatccgctaaaaaaggataaacctcattcacttgcgtaataatattttgccagtctttttctgatagtggagatttggtagctcccggtactactttttgggatagcttgattactttcttggctatagcggatgataagaatagatccttacgccgttccgctatccgaaggacgagggtttcctcttctttttttatttgttcatattctttctccagtttctctcttgaatcaagttcattcagtttttcatttttttcagacaattgaatagataaagcctctaatctatcttgtttgttacgtaaattatcccgtagtctgaataattcattactcttattcgacaaatcgatttcctgcttaagaagtcttttattttttctatcaattcgtatttgaaagacccataataatattaaaagaatagatacagatattacccaatagataaaatacttttgtttatccgattttaatcgcatattttccaatgatatttttaaatgctcatattccttttctatttttattatgttttccctatttcgtatcgtcaagatcgaatctgaggcactgttatattcatccaagtaaaaccaagccttttcccaattaccctccgctttctctaacaaagaataaccataaagtaccgaaaaacgggtcatatcattaaaactaggtacacttgctttctccaaacaaatacgtgcattcttaaaatcgccttcttctatatatataccagccaatgtcctgtaacttggtgcgtcatcaaaatctgacatattgacatttttccacaaatacaatttagctaactctttattacctaacatattataaatatttcctattccattatatatagtccctatatcagaagagtcacctacttcaactataatagtatccgctttcaacaaaaaaattaacgctatatccaaagaatccgaaaacgcatacattcttcccacatcccgcaaggcgaaagccgaacttcgcatattacccgcttttcgaaaataagattccgcttccttatatttgtcctttcctaacagataattaccctcgaaatcatacagatctcccatatagctacaaatatatccggcttgattatagtcttcactgcgtaaagcgatatccaaagcttgcaaataaaccttcatcgctttctcgttctctttatcttccacatacgaacgccccaaatacaaaccaatcttcgcttgttcttgctttgtcccgtgtgacttataataggcttgcgcacgtagcaattgttgtacatagggcagatccgtatataacgtgtccgccactttaccggatagcatacaccaacgagccaataatttatcactcaaattatcgggcacggctatgctatccaataggatatgggaactatccggatcggatttcaacaaggattccgcacgatcgattaggtatatggcatcgctctcatctcgacaacctataaatgagagtgtggataatagcgatatcaaaataagcaaatgcctcattggttcctatctttagattctatgcgcaagataggcatatttttcatcaaaccttaaagaataattgattattaggcttattgtataaaattcttatcgcttggatatctccatcatctttttggaaaaacacgtacgtgttttcataaattctcgtacgtgtttccgaaaaaagacgtacgtgtttttccgaaaacatgtacatgtttttatacatctgattttcaatatactaaaaacagtattcccgaaggcagggatattgtaggaaattcaattatctttggacttttattggtaactttttaatctactatcaatatggcacaacaatccggaagattgctatccctcgacgtgatgaggggaattacgattgcggggatgattttggtaaataaccccgggtcatggaagtatgtatatacgcctttagagcatgcacgttggaacggcctcactcccaccgatttggtatttccgttctttatgttcatcatgggggtctccatgtttttctcgcttcggaaatataacttcaagctgtcgaaagaaagcgtgacgaaagtattgagacgcacggtattgatattcctcgtgggattagggctgaatctgttcgggcatgtttgctacaatggatttaccgatttccagaatttacgtatccttggggtgatgcaaaggttggcgctggcatatggcttcggctcgttgataggattagcgattaatcataagtatattttgcaggtagccgctggtatattgatattttactgggcattactaggtttcacgcatagtatggaaatgtcggaggatagcattatagcgatcgtggacagaactttattcggtacatcgcatatgtatcacgatgatatggcagatggtacacggatcgcctttgatccggaagggctcttgagctgcattggtagcatagcgcatgtattacttggtttctacgtaggaaaggtaatacaggattgtaaaaagaacaatgagttgattatccgtaatatcttcattttcggtacgattattctttttgccggtttcttattgagttacggctgcccgatcaataagaaaatatggagtagtacgttcgtattggtaacttgcggattcgcctcgttattcctcgccttattaatctggatcatcgacataaacgggaagaagaaatggacgttattctttgagtcgttcggtatcaaccccttatatctgtatgtacaaggggatatattcgccgtattgctgggaatgagcggtatctccgcctttatgtatatggatctgttcaggccgatattcggcgatttcggaggctcattagcatgggctatcttcttcgtggtactaaactggataccgggatatttcttgtataagaagaagatttatatcaagttgtaaaaagaaatgatctatgctctgtatatagaacaaaaaatcactatatttgctctatatacaaagcataaatacaaaaatcaaattaataatttaactatggaaaatgaacttcaagttattggaacgaaagaagtagaggaacgtattattgagttaagaggacaaaaaatactactagatagagatgtagcagaattatataaaacagaaacaagggatataaacaaagccgtgagaaataatcctgaaaagttccccagtggttattttttcacattgaaaccctctgagaaacagtatgtggtggaaaatttccaccggatggaaaacttaaaaaaatcaacagtagaacctaaagctttcactgaaaaaggactttatatgctggctactatattaaaaagtccaagagccacacaaacaactatcgctataatagattctttcgtaaaactacgtgagcttatccgaaatgtagatgcgattcaaaatgaacctgacctaataaaacaaaaaggtattgtgaaacgaactggccaactcttatctgatctgttgatagatgatgctgatacaactgaaatggaatctaccatagagttgaatcttatggccgtaaaacttaaacatacagtaaaacgtattaaaaataacaataaaaccgaagataaatctgaaatttagaattgcaaaaaaaatccaaccactctcctattcatatcggagaatggttggattttttataggtatcagcctagctgactagttcacgttataaccggagataaccaccttcggggtctcgcctctcgtatctacatctttccaatggatgttgatctctttcttctcgcccggaagcaaggagaaatagttgtcgctatagaacatcgggaggaattgctcgccatccttctcgcccactacattcacacggatcatcagagccggggtggatgaagtattctctaaggtagcggtagcggtccaagtaccgtcattacccttattggttgccacgttggatcgtaaagtaacctttggcatctcacgcaaagcttggtagttgccttcctctacgccacgcagatagaagttatccgatacgatcttgccattctctgtcaacgtcaacttgacgaaatgagcgctggatacgctagctgggaaatccagtttcatacatttgttggtagtatcttctttactatccacggaaacctcgttttcccatgaaatagaaccgtccatattgatgatttgagcctttgccgtcaaaccattacgtacgccggcgctatagttcactacctcgatctcgtccgtaaccggattccattgaatgtgcagaggctcggaggccttcttgcaaccaaagtaagcggcggtaggctcgaaataataatcgtaagtctgccataccatagaaggccatgccggatgcgtcatccacagcaataatcccttacggttcaagcttcttgattcgaacataccccggtaaccatcatagtttacccactgagccagatcggcgaattccttggcgttgttcggcttaccgaagcccttttcgatgatagcgttgaaagaagcgcaagactgggcgccttccatcgtataatcgtgttgtccccattgagcgttttgcggccaaagcgcttccggagagaaagtacgaaccaagctctcgtaattcatcacgttgggcataccccgctcactatggaacttatcactaccattcttcaagctaaagtattctttaacaggaagcgcacggtacgggccatggccacttaccacctcatccgccgagctggagatataatgtaagcccggatgatcctctttcacgatacggcgtaaagccttgtcgatctgctccggcgggaagccctcgttgcgcccgcaataaataccgatagaggcatggttacggaaacgtttcacataatcctcagcattggcgataaacatctccggatcataaggatcgggtccgtcggaaggattcgccaaccagaaatcttgccagatcatgataccatgacggtcgcaagcctcatacaattccttgtcgccgatttgtcctacccagttacgcatcatcgtaaagttcatatcagcatggtaagccacggcgatgtcgtactcacgaccccggtaattcagattagactcaccaaatccccagttaccgccacggcctataaaacgacgaccattgataaagagactcaagatactattattctcattgaaggtcatttgtcggatacctaccttgaaatcctcagagtcggataccttatcgcctaccttaaaggtgaaattagcgtcgtataaataaggagatccgtaccctttaggccaccacagacgtgggttctgaaccttcaattggctgaagctatttggatcgaaagtaaccgtcttctcctcgtttgcggccaattctaccggttgctcgaaagtgatatcgccgatctttcctgtcaatacaccctttactggagcggcatcatggttcttcacgatcacttccggagtcaaggtagcggaagtcgtatccggcaacggtaatacaacctgtacgaacgggtcttgaatcgttaccttgcctgtagaagtcaagtacacatcatcccaaatacctatattacgaccacggatcgtcgagatccaatcccaaccgatcgaagcgtggaaggttgggttatcagcgcctaagataccaccgttgaaatccgtattcttctcacatttctccttgatagcgccgatatgctcattcttgatgatctccaccgcgacaacgttcttacccggtacgaccctgtctgtaacgtcaaatacacctcggataaacgctccctcgatacggccgatcttgttaccgtttaaatatacattcgctttccagttgataccatcgaaattcaagaacaaacgatcttgcttgaatccttcgggtacctcaaactcatccctataccagaaattagagttgaagaatgactcggatatctgcatcaggttatccgcgtaattcggattcgggatagctccgatattcttataactactcaataccgttcccggcacagtcgccacgatccaattttccggagagaaagaaggtttcgatatttcctcgccggaagcggttacctcggaagctcgttgtactttccagtttccgcccgataaacggatctcatcttttgtagcagccggagcagcagccggttgggcaagcaagccacctttacccatcacctctatctcgcttaagatataacgtccgtcattagccggttgctccatccatacccgtacgtagcggccctttccttttagcttgatctcatccagattagcatctccacccggaagattcgctatgtcaacccattgtttagcgtcgtcggaaacttgaatcttacccttgatcgctttattgatccaatgtaattttactttgtcgaattcggattggctacccaagtccacatagacccactcctctcctgtcgtggcactcatccaagcgctattaaagaatttggaaggaagcaaatctatcaacttatcttggttatagaaattcatctcgaagaatgcccaataagcggcaccttccattttcaatcgcatccgataataagcatattcacccggttgatcgaatgtcaaagtctcattcaacatacgggtgggcaacgtacccggatcccagctattcttgttcgggtctgaatgcgctttatacttgctggcctgccccggcatacctttaccctttaaggcagccaattccgtccaagtatttccatcattcgatccctcgcaaacaatctcatatccatccttaatcttattctcgtcataagccacgctgccacgaaattgtaccttgtcggctttctctttccagttattcagcgtgaacaagaaataggcatcctctcccgtaaccgcattacgagaataaggaccttgatcgatcatccactcacgctcacgacgagctatatccccattttgcgtggagagatcgagatactgaggttgtttatcgctaataacaccatccgtcaccagttgagccgttagattgtaatcataactggaggagttgtaagcgctacgcaaaagagctatgttacgatacgtggaataatccggacgtaatgaaggagaaaaatcctcccccggatctcccggatacgaaccgatacctctggtataataatccgaccgatcgaaagattccgccggaacaccgctctgcccacatcctcctagcaatgctgagaccgctaccgctccacaaagcgtcaagagtcgaggcaattttttctttttactgaatgttctcatactacttattgtgtttctctaaattagttagtttaataagataccgtcacgtcaaaaccctccttccgggcccgttctgcaatcgcatctaattcttctttagtagcttttttcaaagctttaaccggggtctccctatctatcgtataaatcatgacttgtttcggacggatttgttttaaggcggagatccagcccgctatctcctcttctgtcatattattaaccgatttcccatttacttcccccttcaagaacatggtctgtataatcaagtttccgttaaaacgacataattgctttaataaagactcgaaattaaacgccggagaattaggtacgtctatctgccgaatccgactgtctaatacagaatccagtttcaatatgttatcctctattttattcaaggcttgaaagacctcctctttctggagcatcgtagaattagaaagtacggcgattttagcatcagggaaaaatcgatcccgggtagcgatcgtatcatcaatgattccaccgaattccgggtgtatcgtaggctctccgtttccggcgaatgtaattacatccggaacgatcccttccgctttcatggaacttagtttttgctctaaggcttccctcacttccgtacgagtaggcagtttactatgggtcctatgattctcattcaatccacattcgcaataaatgcaattaaaagagcataatttcccgtctgtaggaagtaaattcatccctaaagagacacctagacgccgactatgtatcgggccaaatactattttatcaaaaagaattgtagacatagcgctgtttgtttttacccacgcaaatctactctaaaatttccagcgaagcaaagcataaagatctgttttatcagaaccgcttatctcctccgtatcagtacctatcaaatccctgtcccaataatgggtgtgagccagtttcgcggacaaggataaacgtttccaaatatccagacgaaaggtaagggcaaaccgcatcccatccccataaaaaaagggcatattaaaggcatataatatattcttctcatacgaactgacccggctattgtaatcatccgtataaaaccacgctagataaccatctatttgaagaggtagggtagtgggcttccagcctatactttgggagatcataattcctttattaagtttctttataggatcatcgaatagaataccatctaaggaagtcttaaaaataaaaggagaagaaaagttataaacctgttgaaaacgaatacgatgttgtttacaagtattgattttcaataaattatcattttcaaaagttccattcttttctttttgtcgatatttataacgaagataagctgaatagtttctactaggggtataatctatctgagccatatattcctgtcctccggaaggagcgtctatcccgtatttcaaccaagggaaacggaataagtccgcataaacggataatttccagcgggcgatcggagtcaactgaaatcccatataaaccccttgctcgttctgaaccgtagagccttgcgagaaagcgttcccaaacaaagcttgataacggcgatcgtaatagcggtataataccaagaaagatatgtaggaggcaggcgttaattgcaaggcattcaaggtcgaaacagctccgtttttcgaaagggcaatctcgccataaaacttgatacggttcgttttcaacatatagtcaacacccatgttgaaattgttggaacctttgaaatagaatagattataaggttttggatcaggatccatcttaaacttaccgaatgaataggagagagccgttaaacctacatgaaaatgaggcttagcatagcggatatttcctccatatacctgcatcgttatcgttttcctcttttcccaatcccgttgcaaacgatgaagtccatctgtttttaatgaggtgaatgtcaagctatctacggccgcatccatttttcggtacgaatagaaaacacttatatccaagtttttaatcgtgatcgtaccggccacccctcgaaagaaatcctgttcattggtagaaaagtgcctacggaagccgtttgtccttcgctctgcttgagcgactactgccgtacgactaggagaaaagtcattgctaatcaccagaccttgtccgaaagacatcttgtaatcccctatagccaagctttttaaccagttgatatcttttaggaatagatgtgcggaataaaagtcatatcctttatgatatgcgttccaaaaaggttcgcccgcatctttctcggctacgaagcctgcttgtaaacgatcctcgaaagtataggaataacgtaaggagtgatagaagggttctcctctatatttacgattcggatataacaaaagtatgctgtccgtttgttcaccatatccctttttctgttgaaaacattgatcatacctgatttgtaattcattacgaccatatttcaacaggttcttaaccgtaagcaaccgtttttcaacaagattatcacctatataaacaaatggaaggagaagagatatcgtctgaaaatcgatatcctctatattcttcaactcatagatgctaaccatatttccgtatcgtttccgataggagaggagctgctcaatttggcgatcggatagaaaaggtaatcgcttcagttgttcttccgtcacggcattcaaatcaaaaggatgctcaattaaataagataaatcggcatacaaactttcgatacgctccgtatcctcggtttccaaggctagttcctctacatactccatccacttatcaacagaatattctatttgagaattagcgtaataactatttatcaacaggattatcgacaagattataaacaatcgtttcatagctaagtatcatttaaaaagagaatgataaaccaagaccggtactcatccctaaaatcggatggtaaatagaggctacatctatcgtaaagcaagaaaagttataaccaattcctaaagagggcaggagaggagcggtctgtattccggcacgaataaaaaaagaatcgaaagcagtgtattcaagaccaaagtttccaacaactaggttttcattttccgttcctacacttcctgtaattaacagactgtttataatctcccattgaaaacttatttgaattaagtaataattaaaatcttctatttcaatatctttatctcctatataaacagaaggaaaattcattattaacattcctattaacaacttatcaataggagagaaagtgattccaagatctgttgacagtctggatcttgtattttccaatagatcagtttgcaagaaactatagtgaactccaagccctaacgcccattgatcccccaagcgttttcctcccagcacacgaaccatcatctccctgtatttatcaaacccgaaaacagagatatcaacacctacggataatagttgattcggataataaaaactaccggacatcgtacccagttctttcaacatgtaccgattaaagtattctaaatgaatggactttttctctttatcgacaataagggccggattgaataaaatagattgcgtcgccacattccctcccattcccacgctacggacatccggtaaacgtaagttatcaacaccatgtacatacaatgaaaatacccccgcaaacagggatagcaatagatatttcatagttaagattttgtatggtttctatttattcttcaaggttttctcattatccttatttactctacgctgtacctttttaatatcctcatcaggggagagtcgttcaggcttaattcccctttgcaatagcatatcacaatccaataggcgttgttcaatcacctcggccttacgggtttgtaccgcaaaataagtctgtgcaaaagctacttgcggtttacgactatcaccattttgtgcgattaagtagcatgcgtagcgtgttaataagatgtcatttatttgttgctcagcaccatgccccacaataatcactttcccgacgtcgggaaagtgatcctctatattttctcccgcattccggcacgcttctttggctttcaccactacattattgataaagttatcccatttggcatatcctaataggggttgcaactctctggcactccagcattctatgccttctacctcacatgaaatggattcgaattttccgaatagggcggtaatttcttctttcttcatagttaatatattcttaagttgttgtcaattgcgcaaatgtaatgttttatattcatttagcaagttattaacagataaatgatgctgagagtcacgcagtatttatattttcgcggtatatgatacgaaaagggatatattgtgttttggctctacttgttctctgtagctttaaagggatggcgcaggcggtaaagacaaatattgttccggaaggttatcagaaagctcaactgtatgaaggtgatacaatggctgtcgtcaaccttcgggaagtttttatatatcctcaagttaagtttaagaataagcgtgaacaagccaagtacaataagttggtacgagacgtaaagcgtactttgccctatgccaaaatggtgtatgatacgttgatagagacctacgaatacatggaaaccttaccgaatgacaaggcccgccaagcccacttgaaacggatggagaaagagttgttcgcccaatataaaccggaactaaaaaaattatccttctcgcaaggcaagctacttatcaaactgatcgatagggaatgtaatcaatccagttacaatttactgaaagcctatctgggaagtttccgtgcgggcttttggaatttcttcgcaggcatgttcggagccagccttaaatcggaatacgacccgaaaggtaaagatgccatgaccgaacgggtcgtcgtattggttgagaatggtttaatctgatagttgcttgaagaaatcccagatcacgataccggtagtaaccgatacgttcaaggaatgctttgtaccgtattgaggtatttcaatacatatatcacagttatcaaccacattttgttgaacgccttttacttcgttacccatgacgatagcgtatttctttgtcttgtctaactgcaagttatctaacatgacactaccttccgcttgctctacggcacataccgtatacccctcttggcgcagtttatcaacagcctccggggtatccttgaaatattcccaatctacggtttcttccgctcctaaggcggtcttatggatctccgcgttcggagggcaagccgtaataccacaaagataaatagcctctacccggaaagcatcggaggtacgaaacacggaacccacgttattaagacttctaatatggtctaaaacaacgattaaaggtatcttcttactttccttaaaagcctcgggagtcaggcggttcaattcggttacttttaattttcgcataacaaatatctttgaccgcgaaagtagcgaatatccgtggatatgccgttgaaaagctattaataagtagtggacataaaatgaaaaatatttcttgctttattcaaatacttgtccatacacccccctttctcaaattagcaaatgaataagccacttatttattacgcgctatcaacagcccttatacacctattgacagccttgctggaggatctattttttcacaatcaaggttatcaacaataaacagctaaatattcataaagtctataactataagaactacaatctatagatagacatccatgctgttggtatccttttgataaaccgttcacagactttaataagtcaataaccaaagattgtaacaaaaatgtattaaccatttcaacagcctatcatattcatcatatttatttttaaaattaaagattaataagaatataatataatgattgtggataactcttgagggttgagggcaactcatccatcggtggcaaagataagaatctttcttgttatttctataaatgaagaaagtttatacctttgtgctttgtgaacaataggttgataaactagataagatgaagattatcagtaatactttctgtggataatattgtttatatatagtgaaaagcctattgggagcagtagaaacaggaatcattaatatataaggctatgttgacaaaccaatcaatcgggtacatggatgcgcccgttcctaaggatttagaccttaaggaagcgatcgacaagttacgtaaagagaagaatgcgattattttggcgcattactatcaaacaggcgatatacaagatatagcggactatgtgggagacagtctggccttggcacaatgggcggctaagacgaaggcggatatcatcgtgctttgtggggttcactttatgggagagacggcgaagatcctctgcccggataagaaagtgctggtaccggacttgaatgccggttgctccttggcggatagttgtccggctacggagttcgccgagttcgtcaagcaacatcccggtcatacggtaatctcttacgtgaatacgaccgccgccgtgaaagcggtcacggatgtggtggttacttccacgaacgcccgccagatcgtggagagcttcccggaaggtacaccgatgattttcggtccggatcgtaacttaggtaattatatcaatagcatcacgggacgtaatatgttgctttgggatggcgcttgccacgtgcatgagcaattctcattggagaagatcttatctttgaagaaacagtacccgaatgcggaagtgatcacccatccggaatgcaagcagccggttatacaggtctcagacttcgtaggatcgaccgcggctttgctgaagcataccattaagtccgacgcaaaacaattcattgtagcgacggaaagtggcgttattcacgagatgcgcaagcggagtccggataaggaattcatcccggctcctccgaacgacagtacttgcgcttgcaacgaatgtaatttcatgcgcttgaacacgatggagaagctatataattgcttgaagttcgagatgccggagatattcgtggacgaggaggtacagaagaaggccatcaaaccgatcaagaagatgttggagatctctgagaagctgggactctgatccaaacaaatgcgggataggtctcaaccgataggccggacttgagtgatataaaagctaagcccggtctattatatgtaaataatcaaaattatgtacaatatctacaactatccttataatcatttgattttaaaatatttatcctattgttgtagataggaaaacatctacaatagtaagtctttatctaccatcatttcccgcttttagtaagtgtctttgccatgccgtcaaaggaattttctacactctacgtatataatcagtccgtttttcttcctttctttatatagataaaatattaatatataagtatttgtggttttttatggtataaaacaaaagttttacacatggaaaacatttgttttcatagaagaaaactaaagttttgtactgaagaaacttctgttttcccatatagaaacttttgtttccctaggaagaaaccatctgcttcgctactcgaactcggacgatcccgggaaagaatatatcaagaatgatcgctattaattaccgtaacattctgaatttagttacttttgcgtagaaatctaattgtaattctcaatatcatgaaaaagataggactaatgttggccttattatgggtgatttgtgcgctctcgtgggcttcttctccggatgcccgtattaaggggcagttaatagatgcctctacgaatcaagtgattaattatgcggatatctttctgtttacgatgggaagtgaaaaacctttgcaacagacttttccggacgatcaaggacgtttctcgtttactaaggtggctccgggtaattatgtggtcatggtccgtttgatgggatatgatgtgtttacaaagaatgatatcatcttggatgccttgtctccggtggatctaggtaagttgatgatgagtcctttggaggtaggtatcgccgaagtggaggtagtggctgagaaacggcaattggtttataagctggataagaaagtggtcgaggcctcttccaatatgatgggaggaggcggttccgccgtggatatattagagaatacgccttccatacgggtagatgcggaaggcgatgttacttttcgtggaagcagcggctttttggtttacatagatggtaagccgagtgtcttctcgggtacacaggctttggagcaagtcccggccgggcatatagagaatatagagattatcacgacaccttccgccaagcatgatacggaaggcgacgtgggtatcattaatattatcacgaagaagcattcccagcggggattgagcgggatggtgaatctctcgggaagtacgtggctttcccgccatgtcgatttcttgttggcacagcaacatcagcgttcccgttggtacatcggcggacagtggacagaccggttgcgcaagagtgatttcgaccaagagaagatgacggtggtgggcgatcagaccactacctcgcattccgtcgggcctcgtacgggaaacagctatcattatacgatgaaaggcggttggagcctgaatcttcccaagacaaccatcgcgttggatctggagggcggctatggcggaaataagcgtaagggaaaaatgaactataaggaaacccgttcggtagcgggcggctctccggtgacggaagattatcgaagcatagatgattatgataatgatgagaatataggtttgggaagtctggcggtacagcataagttcaacgataaggggcacgagctttccggtagtgcctattacaaatatggcggtcatgccttggaatatttctttaacgacttgatgtccttggaagggcaacgccaacaggggcaccgtgcttatgaggccgagcaccgggaaacgatgcgtatcaatctggattacgccttgcctttcggaaaaggaggtaagctagaggcgggttaccaatattattcttatctggaagacggcgattacaatatggaatggtgggaccccaagggacaaacgttcttttggcgtgacgatatctacaacacgttttattttcaagaaggggtgaattctatctatacgattctttcccatacgtggaagaatttagaggcgcaagccggcgttcggggagagcatacgcatacggtcttgcgaagttccgtggagggagcggatcgtacgaagaatcgttttgagtttttcccatcggtgcatttgggctatacgttcccgaatgaacatcgtttgttggcttcctattcccgtcgtaccacacgtccgcagcttttctatatggagccttatatcacgtatcgcgacttttatacggccgagatcggtaatccggatatacgtccggagtacatcaactcctttgaattgaactaccggaagagtttcggggaaaacacggtatccgccaccgcctttcatcggtatcggaaggataagatcgagcggttgcgtgttccctattcagctggtgtaaccttggattcgatggcgaacgtaggacatgattactcgacgggtatcgagctaagcgtcagcctgcatccggtgcgctggtggaataccacggtcaatggaaacgtttatcactataaggtgaagaacgaacaggccgccggtggaaatacgacctctagcaccaattacgatatcctatggaataacctgtttaatctggggaaatacacacgtatccaattggatggtagttttgtaggcccttccgtaacgacgcagggccgtacggacgcttattggtacgcgaacgtagccgtccgccagcaactatgtaaccgaaaactaaccgccaccttagctttccgggatattttccgttccgccaaatatatcagcgatatccaaacggcagatttacgctccctgacacgtatcaaacccaaatatccacaaatcacgttgacgttgagttggacatttaatagtttcaaggccaaatccacccaagcgaaagaagatcgctcggagatgttcgagggtataaagcattgatattgtatctttactgtattggtttgtcttcgggaaacaactacgactacaaataaattctgcaatcgtagttgtttccctcttttacggatggtgggatttggttcttggcattaatcgctgcgaaaggagcggagaagataacagatcagatcatccgagcattgcgttcatctggtttttctttttaggatgatataaacaaggtttctctatgtatttccaggataacatacctaatccggtgctaaggatagtggtaagagccaatgtcaatataaagctatattgatcaagtccgtaatgaatgaatatctggatgatcgggaaatgaatcaagaagataccatacgagaaatttcccatccggttgaatacatgtaaccacttgaatccgtaagctaccgtgataatgatagaggctagagcgataggctcgaaaatactcagcaacagatactctctacccaataaaagaaataggctgacagggaacaaatatctcatatattttcgaaaaatagggaaataggcaagtatgataataccagaacaaaagtacatcatttgtccggggaattgtcttttcatgaattcataaatagggttgtgtgtcatatcatctaaataattacacgttgtcgagtagatgaaagataagatataaataagaagtaggcatactaatttgttatatcttttcagtaaccaatagataatgggtatggtgatatatagcatgaattcaaccttgatagtccataaagacccattcatcgcttgtaaaggattggtatcgaatacgccgggtaaatccggcgataaaaagttaaatgtaagtaaattacagataagataggtgtataagctagaagaggtgaggtattccctgcaggataaggaagtaaggaataatccgattaaggcacataataaaatagtcaagctgtaggcgggcataatacgttgaatacgtttacggaaaaaaatccgggtattaggcgtacgtaagaagctaaacataacaagaaatccactaataataaagaaacctttcactcgaaatcctccgctaacaaaccaaaaaggatctgtctctgtcagtgtgctgaaatggttgaacatgacagaatacgcaagaaagaagcgaataaaatcaaaattattcgcttcttttacttgatttattaatctggagttgagtaaaactttctctgattgattcattgttctatttgactacaatgatttttgttacgacgctctctgaggcttcctccgtggaagctagtacaagatatacgcctgtcgctacacgtgatccgtttgcgttccggcaattccagatagcttgcccccccaaggatttagtttgataaataatatttccgtttaaatccgtgatttttacattcgaattatccattaatcctacaatcgttactttatccatatgttcgggacgtaccggattaggatatgcgtagatctccgagtaatcagatttaccttccgaagcttctccttgataggaatttagtcctttatcggtaccgataaaaacttcaccggtcttatcgtttatctctatatcgtatatgttatcggaaaggagcgggctattggtcgtattaaattgataaacgattgtctcattatcattatctagaacatagacgccatttcctttggttccaatccattttcgattacctgcgtctacttttagggtcgtgacgacaacgttatctaagaaataagcgagattgccagtttcctcattggtatattttacccttgtacaacgtgtagcggctttatcctcagcggaagagatcctaggtttagtgaagtatacggctccccgattcgtaccaacccagatatatccatccttatcctcggctacgcatgtataattactaggagtcaattcttttccgtcggtatcaataagtgtagtaaactcatacgaggaaacttcgtctaaagactcgctattcggtatcattacaagtttaggggtgttacgaggcacataaatccatttgtcgttagtggaggttataagtatatcgtttattgtataaactcctctaagttgctcgatatccaaacgatgccatgctcctgctttgtcaagaacaagtaccgcatggttaacctctgagcttgtcatccacaaatttccatttttatcaaaggccagtccatctatataacaataaccggacccatagcctcctgcggtttctttaaaggcattcttttcattgtatgactggacgggagttccattcttatattggataacgccatcacccatggaagaggcgtatacgatctcatcattagaatcatcggtcgttacggctatacttgtatagtctcgtggatttcttggtaaattgagtttcttttgggcttctttaggatcgataaaagaccatttatcataatcgtatgtaagaatataacctcctttgtcgaagcgcttaccatttaggaggtctttacctcctatgatcatatatactttatcatttttacaaacaatatcgaatgcgctattgctgtaaggtccgtctaaaatgataggttcattaagagcctcaaaactatttgagcctttccgttggatagaacgtagccctttacttccttccgctatccaatatttgtctgtttgataggtactgatgtcattgatacttaagtttatttggtcaaacttttgtgtatcggatacgatgaaaacccttgagttatctatacatgctaatttttcgcctattactttcatgtattttagggttgagctatttattatttgggaaagctctccattgttttcatagaagataccttgctgactgaccaagtagaacaaggtattcttgaatgaagcgatagctgagatcgtatgattatcggaaaggtttgataatccataaggtttccagtttgctttatccagcaggttctcttttaatgaagcatatataattcctgaagatatttcttctttattggttgtggaagcatatatattcccattctgtatagcgcatgatgttatatttaaggaaagattataagtatccttaatttcctttttggccatattgactacgacgataccaaatgcagtcgataaataagcatattcatcatgtaccaatatcgaattgatttgtttgtctcttatggacgtactggtcgacagataaggtagatttgtcgccactcctccctcaagtatatctatatttgaattatcatagataataaggagtgattttacttgtttattatagcggatcaaagaaatcgtattatcatttaatccatttcctttataatattgcttaatactattatcttcttttccatacgtataaagagatccttccgctaccacaaatacttggtcgttcgattcctctacgctgtttgtgttattgtaagaaagatacgttttccatccggttgtattaaaattagcggctaatacagtgaatgaaaaaaatgaaaatagaatgatagtaagtatatgtctcatattaacaattataatcagataaaaatgatgttaacttcatgacggctttcgcacgatggctgatctggttttttgtatcgttacccatctcggcgaaagtttgtgtataggtatcaggcatgaatataggatcgtatccaaatccgctatctccgcgtttttcggtagtgatagagccattcacgataccgtcgaaggtatattcttttccgtcaaggactagagctatgaccgtgcggaaacgtgcttttctgttttctttatgattcatttcggacaacagcttgttcatattagcttccgagtcgtgccctgttcctgcgtaacgagccgaatagactcccggagcattattcaatacctcgacttctaatcccgtgtcgtcagcgaaacaatcatatccgaatttctccttgatatagcgggcttttagcaaagcatttccctctaaggtatctgccgtctcggggatatcgttatggcaatctatatcggataaacttatgatttccgcgtatccggcggttatcttgcggacctcgtccagtttgtgttgattatttgtcgcgaatacaagtttcatatttcgtaatctattaaataagaaagcatttctatacggtagatatataacgtatggaaatgctttaaattgtttgtatattcttttttaagtctttatctgatcgaacccctcaccatatacccctcggacaatgctttgggagatgaacgcttggtggtctatccgtttcacgatccggaagatggagacggattcggatttcttggcgagtagtacgactaccttgacgggtttgcgggaataaccgccctcgccgtccagtatcgtacagccacggcctaagtcatggatgatgcgatccgctatctcgtcgtacttctgggagaagatgaggaattgtacggattggcggttaccgttcaataccatgtcgagaacgtaattgcttatgaccatctccacgaaaccgaaaacgatcttgtccacgttatggaacaggaagaaagaggaactgatgatgaagaaatcgcaaaacagaaggatacgtccgatcgatatattcttatatttattgattaccgcaccgataatatccgtacctccggtactaccgttcgccgagaataccaatcctagtccggcaccacacataaacgctccgattatgatagccataaacggctggtcgtgcagtataggttgtcctttcagcagccactcgaagagagagagagaagccgagagtgagaaaactccgaaaatagtttttatcaagaattttagaccaaggatctttaaggctaccaccaacaaggctacgttgatgacaaaataagatacggataccgggatcaatccattggaggcaaagaagatcaacgcacagataccacttaccccacctgtcacgatctcgttggaaaggataaaggcgttgaatccgaatccgtataataaagttccgaacaggatcattagataatcctgtacggaaaaatagatttttgtgagttttaagttcatcccactacgatattaacgattttgccgggaacgacaataactttcttaacggccttgccttccatccacttcgctgagttctcatgattcaaagccgctttctcggcgtcctccttagaaatatccgccggtagctctaggttgtagcgagctttaccattgaatgagatcgcgtaaacaacggatttctccttgagatattcttcgttgtgtttcggccaccgggcatcgcagatggtcgtatcatgtcctaattgatgccatagctcttccgctatatgaggagcgaacggagccaataaagtgatcagcggctccaagatggtgcgcttgctgcattttaagctcgttaactcgttcacgcaaatcatgaaggcgctaatggacgtgttgtatgagaaatgctcgatgtcgaacgttactttcttgatcagcttatgcaaggatttcaattcgtcggccgtaggctcggcatcggtaacttgcagggtatccgtattgccgaagaacaagccccaaagcttctttaagaaacggtgtacgccatcgataccgttcgtatcccaaggcttggattgctccaacgggcctaggaacatctcgtacaaacgtagggtatcggcaccatatttctcaacgatcatatccgggttcactacgttgaacatggatttggacatcttctcgaccgcccatccgcagatatatttaccatcttccaatacgaactccgcgtcgttgtattccggacgccagttcttgaaagcctctatatccaacagatcgttagatacgatatttacgtctacatggataggggtgacctcgtattggtctttcaagttcaaggaaacgaatttattggttccgttgatgcggtacacgaagttcgagcgtccttggatcataccttggttgatcaatttcttgaacggctcttcctcgcaaacgatacccaagtcgaacaagaacttattccagaaacggctgtaaatcaagtggccggtagcgtgttccgtaccaccgatatataaatccacgtttctccaatattcatccacgtctttagctaccaaggctttatcattatgcgggtccatatagcgcaaataataagcggaagaaccggcgaagcccggcatcgtacaaagctccagcgggaagatcgtctggttatcgatcttcgatacctcggtgactttttggtttaccgtgtcccaagcccatttaacggcgtgtcctaatggaggctcgcccgtctcggtaggcaagaatttatctacttccggcagcaacaggggcagacattcttccggcaacatctgaggcatgccatcggcgtcgtaatataccgggaacggttcgccccaataacgctggcggctgaaaatagcgtcgcgcaagcggtagtttatcttcacacgtcccagatcgtgatcttttacgtatttcttggtagcggctatcgcttccttgatcgtcagtccgttcaaggaaagatcgcaataaggagtaacgccggctctcggagaattgcatacgataccttccttggcatcgaaactttcctcgcttacgtcgcaaccttccaccaaggggcggatttccagtccgaaatgcttcgcgaaagcgtagtcgcgactatcgtgcgccggaaccgccatgatcgctcccgtaccgtagccggccaatacatagtcgctgatccagatgggaactgcctcgcccgtaaacgggttaatagcataggaaccactgaatacaccggttacctgacggtcggcgatgcgctcgcgctcggtacgtttcttggtacgatctaggtaagcgtctacttctgctttttggtctgccgtagttaattgttgaaccaattcgctttccggagctaataccatgaaggtaacaccaaacatcgtatcggcacgggtcgtaaagatcgtgaattccttgtcgctgtcttttaccttgaagcgaacctcggcaccttcgctgcgtccgatccagttcttttgggtctctttcaaggaatccgtccagtcgatcgtatccaatccgtccaacaggcgttgcgcgtaagcggatacacgtaagcaccattggcgcatgatcttttgttccaccggatagcctccacgctcggaaacaccgttcacgacctcatcattcgctaatacggtacccaaggcggcacaccagtttaccatggtctcgccacgataagcgatccggtagttgagtaatatctcttgtttttctttatcgctcttggctttccattcctcggcggtgaaactaagttcctctccgcaagctacgttcagaccttccgtaccactggtctcgaaagcctgtatcaactcgctgatcgggcgggcttgcttctcgtcgttgcagtagtagctgttgaacatccggatgaaggcccattgcgtccatttgtaatattcgggatcgcaggtacggatctcacggctccaatcgtagcagaaaccgatcttttccaattgctcccgataacgggctatattattctttgtcgtgatctccggatgttgtccggtttggatggcgtattgctcggcgggtagtccgtaagcgtcgtaacccatcgggtgcaatacgttgaaaccttgcaaacgtttgaaacgcgaataaatatcagaagctatataaccgagcgggtggccaacgtgcaatcccgcaccggaaggataggggaacatgtccaatacatagtatttaggcttattcatgtctttttcgactttataaaccttttcggcaatccagtagtcgtgccacttcttctcaatctctctgaaattgtactccatgatcgtttatcgtttttgtatcgttttctatttaaggccacaaagttagtgaatttatttattttatatgagttatttacatgaactgtttatttcacgtaaccaatccgggggcgagattgattctcggttcttttcgcttgtaactcagcgagtgacagattgattagctcaagttgcgtacgggtatcttcgttgatgtcgttgtaatcggcaaatgcttcttcgatatacgctttgagttcctttacttcttgttggagttcaagcaaaggggaggaagaacttattatttgtcgtatgccgacgaaagcacgcatgatagagatattgactttaatggctgtatcggatctgagtacagaagaaagcattgctataccttgctccgtgaaagcgaatggagcatattggttacctcctttctttgagatgccaatttggcataccatattgtttttcaagttgttaaattcttgaattgttaatgtgaacataaaatcatcaggaaagcgttctatgtttcgtctgaccgcacgtttcagttgggcggtttctgttccatacatttccgccagatcaaaatccagcatgactttttgccctctgatctcataaatcttgttttgtatcgcttgtaattccatagtataagaacttattagtttactttatttgatataaccaattttaggtcttttagcattgttctttttctttgtagccagttcggaaagagctatgtaaatatcatccaaagacttttgggtatcttcactgagatcattgatagcgcaaagggtttcctcattagccatttcaagagatttgatacgttcttgtagttctttaatttcgatggaactagtgatagtttgtaaggtataattccggatagcgacaaaggctctcataatgtttctgttgatttcgatcgcaatgtctgagttcagcacactacttagcattgcgactcctagttccgtgaaagcgaatggcatatatttaaagttattacctctacctttattcaaggtcacaaattgtgatcttgaaagttcctccttggtcaattcaaacataaaatcatttccctcgaatcgtttaggattacgcctgactgcctgtttaagtacccttgtctctattccatacatttccgccagatcaaaatccagcatgactttttgccctctgatctcgtgaatcttgttttgtatcgtttgtaattccatagtaaagattttagtttaatattatgttcgcaaaggtttgtaaaataattgagataagcaataagctagttggatattaatgattggttgcatttgtaagttgtacaatgaattattgctgatccggcttattgtctattttttatgtgttcttattttccttataagatttccgggaaaaacacgtacgtgatttatgaaaaacacgtacgacttttcggaaaaacatgtacgtgttttccggaaaacatgatgatgtttttatatcactgatattcatgtatatataacttgatacctttgcatggacttattgttttttttcttcttgtatttgttattttgttgttctatcgtttgtttatgaattaaaaatatttaattttgcttatctataataaaggatgaagtcatttatatatatactattaacttccttgactttccttgtggtaggatgccaaaatgaatctgaggaaatccgtttgatcaatcaggcggaacgcctgtttgatgcctatccggatagcgtaatcactacattggattccattccgctcccggaagagatgagtccccgtctggtagcccgttggtgtatgttatacgcacgtgccgccgataaaatagaggacgagatgccttatacgaaccagcttgagatcgccttgaaatattatcaaaagaaaaagatgcggaaagaggaggctgagattggcctttatttggggcgttcgtatgtggaggataaggagtacgagaaggcaatgagggcttactccgatgcgctggaggtagcgttggcgattaagaactataatcgtgccgggtatatttgtagttatatgggggatttgtatgaactggatgatcgttatgtgttagctgcaaaaaaatataaggagagcggacggtattttcgattggccggtaatatgaaaagctatgtgcgttcgtttgtgaatgagggaaggagttatatggatgttgattctaattatttagctttaactatattgaagcgagcagaagtgataatagattccttgagagtagatgaggttagaaattatgtatacaatggtctaggtaatatatttaatgttttggaaaaatatgatttagctgaaaaatatttattgaagagcataaaagaggattcgagtgatactgcttcggattatttgaccttatcagatcttgagcaaaagcgtggaaatttagaacaagcggaaaattatcttcaaaaggctaatagtgtatccatagataatgattttgtaccggctactattgcttatcattattataaaataaataaagaaagagatgattataaaagagctttgtctttttatgaagaatatgtagcagcagaggattcccttatgaatataagtaaatctgtcgatatatatgatacagaacaaaaatatgaacatttgaaattgcataatgaaaatataagattactattaaaggggcaaaggaattatacttttatattgatattgttatttttatgtgctttactcattattgtctatttagctacgataagaagaaagaatcgttcacttttaaaacaacaagaaaaaattaatactttgaatcaaagcatatatcaattatatgcagaacttcggagaaagagtgatgaactaatccaattgcaaaatactcagtattcttcggtgaaaatgcaagtggaatatgaaaatgtaaagaaagaggtagatagcttgagatctcgattattcgaattaagagaatctaaaattctcaatagtaatttagctaaaaaaataaagaaaatatctcaaactgtgcagcctaatcattctgaagcacccgtttccgaaaaaatgtggattgatattgaagttttgatgatggaagtttaccctagtgttataaaggtactgaaggatgcaggcttgtcaccatcggagatgcatctttgtttccttacattatttaaacttgattcaacagctatatctatccttttaaatattattcctacttccgtcgatcgtacacgtttgcgagtacgaaagaaattaaattgggaaggtaaacaaggattgtatgaatctcttgttaatatttagtatgtaataaaccttcatttaaggggctctacgattgtttgtctatgtatttgtttttatagtatttgattgtcaagtgtttacgtttttttctttgtctatgtggattacataatttaacccctttagatcatatataatctctagatttgcaaccgaaacataacaaaaaaagagagattatgaaaaatgtaaaatggctactaacagtgttgtttattttttcaatttgtattccatcttttgcaggtcatgtgcctttacatggtcatcttaagaaaaaacagcgatctgtaaatttggatgtacctataaaagcagacatagatgaaacttcaaaagttttgtctttggagtttttagaatatataggagaggtacgagtatctgttgtggatgcgaatggaaatatcgtttatgaggagatagtggatacacaagatgtttcttctagtattatctcattagatgaatgtacttctggatcttatggactttatatatcagattcagaaaactacgcagaaggtttttttaatttataaataattcaaattttagaagtatggacaaaaagacagtgcttttagcatctgcatgtactttattgatgatatcatgtagtaatgatgcggaattgattaatgttgctgaaacgacaggattacaaacaaaggcttttgttggtgaagcagatttccaaattgtagattatgcgggagataaatgtattcagttcaagaatgattccgtctttaatgcgatgctttgggagatgaatgatatgtcagaagaagagagaaataatattttctcgggggcaggtttcgtaagtcaatggcaacttatgcaagaagcagatcaagaacaggagcttattgtagacaattatgagaaagatcttagccaaccttggcctgctcatcaaatcaaagaattcaaacaaaaatatgatgatgttttcatgtttgaaccttatgattctacagattttattgcgcattataaattaaaaggttctacatatagttcttttgtgaatagaaggggggtgtttttgataggagatagtgtagcacatgctcctgtatataaggctttagaggaatatttcggatcagggatatcattgtatggtaataatgaagctacaaatgaaaagaatgatataaacctagctgaaagtaaatatcaaataccaggtggtgattatgtaaaggttcgagctattccaagatttatagagttacaaactattgaaaataaaaattatttgtcattgggctttgattatcttagtcaaaaaaagaaagttttatggaaaaaacaccgtacaatgattatactacgtcttacagcttcagggtcaggaagtggttttgaagtatataatgtttcaattaaaaattatcagaataaaaatggggtaacaattcttttacatacagatgtatataataaacttttagctaaggatcaaggaggtatgttagggcatgttggtgaaaatccaagaaactcagttacaatcgtaactcctcctcgatttgagttttctggacgaatggaaatttggtcagatgaaatgcctgaaagtaataaagggactgcaaaaataagtttaaaagaagactggtgataatttatgaaaaaaattttatttttactgttattgatttctacttcagcttttgcccaagtagagcatggcttattagtaggtgccggtgttggatttcctttacaagatagttggaaacgaactacttggggtgatgaatcaaattggtcttatcggcacgattataagttaaatagtatgatcggttatcgcttccgattccttccggaacagaaattcttttatgatttggatattacgatgggatttcagaagatggaaacgacgaagtattttccttattatgaaagtatagaggatggtatatatgtttctaagaaagctgatgttttcgatgagtttgtgatgcctatctccgtagccgctagttggaattggcgttttaccaagaaattccatttgggtatcggtatcgctcctacgctttatgtacagccacaagccgtgtttgatctgtccgtgatggcgaaggtgggatatcgtttaagcaagcattgtgagttcggcctttcttatcagtatggctgtttcaataccttgaagcatttcaataacggaccggctaatggccgtcgtggacatctttcggatttgatgctctctgtatatgttccttttgttttgaaatgatagaataataaagtatagaaacacataatgttttatttggaaccaaaacaaagatgaataactgcctataagaaaagagtacgtgaaaagagccatgtgtagagagataattctatgcatggcttttgcttgtataatgtatatagattctcaagaattattgaggcattttttgtttgcgatattgtctctctcgtgattaagaactatctttgacaaactatccaatagtggatgccgaatcaaaatcaattgactatgaaaacaaaaaaattgaaattcttcgtaaatttgtggttctttaagcatatcttatagtaaggatcgaatatgaaaatgagtgaaaaggaggttgatacatcaaatgaactacgggtcttgtccctgttctctggatgtgggggcatggatttaggattcgagggggattttatatgtcatcgtaagtctatatctcctcaaagtacgtgggttcaagaggttatcgatgaacactgggttcgtttacagaggaatcgttttcggacggtctttgcgaatgatatattgaaagaggcacaaatcgcttggcttcaatatatggatcgattcggatatgataaaaacgtttataatacaaagagtatcgtagacttggtgaaagagcatcgagcggggaaaaaagttttccctaaaaatatagatgtcgtcacgggaggttttccttgccaggatttcagtgtctctggtaaacgtctgggatttgagtcgaataaggatcataccgggaaattgcgtgaggacgatgaggcctcggaagagacgaggggtaaactttactattggatgaagcaggtgatcgatattacgagacccaagatatttatcgcggagaacgtgaagggactggtgaatctgggagacgtgaaaagtattattcagagagacttcgcccatgcggctggggatggatatattgttttagatcctcaagttttacatgcgggcaattatggggttccggagtctagagagcgtgtgatttttatcgggatacgtaagtccgcgttaaaggttaaggctttaagagcgcttcaagaggagaagatacccaaagcttacgatccttatccgagtccgacacatgcttgcaccgtggaagataagaaactattgccaccggtggtttgtcgggatgtatttgtaggattggaggaaccggataggacagaagatccatcccagcggtattattcacaggcgaaatatatgggagctcattgtcaaggtcaaaaggagatcgcgctggataatattggcccgacgattcgttccgagcatcatggaaatatagaataccgtcgtttatcccgggagcatgggggcattattacggaagaattagacgccggtttacaagaacgtcgcttaactcctcgagaatgtgctttgatacagacgtttccgccggattatacgtttgtctcccataaaaagaacagtacacgttttgaattaagtgcctcaggcgcttataaagtgatcggtaatgcggttcctccggtattagcgtatcatatagcgaatcgcatacagactttatggccgttgtattttaaaaagagataatatggaagaggagaatattattactgtgcgtaatagaaatcttcaaaaagcggatgaggcttttgcggattttatgtttatgctggaatcatacttgaatgaaaaagcagctgctattccgggtacgtattgcgattgtaagagtaaggaattggaaaatgtagtagtgaacgtgatgaaagaactttgcggtagaactcctttccgtgcggaggagatacgcttggtttccgcccaatattttccggatattatcgcggagaaatattatggagttgaggtaaaatctacaaaagagaaccattggacatctacgggaagtagcatcgtggagtctacacgtgataagaatgtagaaaatatctatatgctcttcggtaaactgggaggtaagacggcggagtttaagtgccgtccttatgaggattgtctctccgatatagctgttacccattctccccgttatttgattaatatggaattaacgaaagagcagactatttttagtaagatgggagttgcttatgatcaattaaggaatgctccggattctatagagatcgttcgaaaatattatagggaaaaagccattaaagccaaaaagaaagctatgccttggtggttgggcacttccgctgaggaaagtttggaggagcatacggatatgaatataagcctgtgggtggataatggagaatatgcggatccggaaaggaataagagactaaaagcggagatatttattttattcccggaagtagtgagtgggaattatgagaatgctgccttatggttatgtacgcgccggtctgttgttaattttcatatgcgggacactttttccgcagggggccaacaattgaaactgaatgatgaacttctgccttttcctttaccgcatgtggttggtgagttgttagaatctgcgactttaataaagaactatcttcttaatagtgatgatttagacttagatatatctgaattccgtccagaacttatgttgcctaaccgatatgaggtctggcttaatgatatttggaaacgtattcatcaactaaaaccttataaaaggaaagagactatcgaagaattgggcggtatttcattggccgaatggatcgataggaaatatactttgtctgtaaaataaaatatatcttcttctcgatcgtctccctaagatcatagatcgtatcaagaagcatacctatcccggaaaaatacgctgttttatatctccgcaaacggcttaacgacttgtatatggaattagtaggggattgagacggttgatttagaactaatagcgaatcagaagggttatacaaatacgtaacattaaagtttaaagctatgaagttttttattgacacggcgaatctggaccagatccgggaagcgaatgaattgggagtattggatggcgtgacgactaatccgtccttaatggcgaaagagggaatccggggggtggaaaatcaacggaaacactatttggaaatttgcgagatcgtgggcggggatgtaagcgccgaggtaatcgctaccgacttagagggcatgataaaagaaggggaggagttggccgctttacatcccaatatagtcgttaaagtaccttgtatcgaagcggggattaaagcgataaaatatttcaccagaaaaggcatccgtacgaattgtacgctggttttctctgtcggtcaggcgttattggcggctaaggccggggctacgtatgtatcgccctttgtcgggcgtttggatgatattgccagcgacgggatagagctggtacgtaagatcgtggaaatgtatgattattatgattatgatacccaagttttagcggcttctatccgtagcacccagcatatcatccaatgcgtggaggccggggcggatgtggctacttgtcctttgtccgccattaaaggcttattgaaacacccgttaacggatagtgggctggctacttttctagcggattataagaaagtaaacggatagaaaaaaaatagtacctttgtgcggattaattcgtaaacgcatttaaaagattactatcgtggcaaaagttgtggaaacccctttgatgaagcagtatttcgatataaaagcgaaacatccggacgctatccttttattccgggttggagacttttacgagatgtatggcgaggacgccgtgattggcgcggaaatactgggtatcgtacagaccaaacgtgcgaatggcgtagggcagcatgttgagatggcgggatttccacatcatgccttggattcttatctgccgaagttggtgcgggccggtaagcgtgtggctatttgtgatcagctggaagaccctaaattgactaagaaattggtgaagcggggaattacggaattggtgactcccggtgtttccatcaatgataatatactgaatcataaagagaataatttcttggcctctatccatttcgccaaggaggtatgtggtatctctttcttggatatctctaccggcgagttcatgacagcggagggttccatcgattatatcgacaaattactcaataatttttccccgaaggaagtgttgatcgaacggggaaacaagaagcgtttcgaggaggctttcggtcctcgtttctttatctttgagctggatgactggatctttacgacctcggctgccgaggatcgcctgttgaagcattttgagacaaagaacttgaagggttttggcgtacaacacttgaaattaggtattatcgcttccggggcgattctgtattatctggaccagacccagcatacgcatatttcccatatcaccgctttatcccgtatcgaggaagatcgatacgtccgcttggataagtttacggtacgcagcttggaactggtgggtacgatgaacgatgagggaacaagcttgttggacgtgatcgataagacgatctcgccgatgggctctcgtatgcttcgccggtggatactattcccgctaaaggatgtaaaaccgatccaagaacgccaagaggtcgtggattatttcttccgtgaaccggagacaaaggagttgctggatacgcagttggagcagatcggcgatttggaacgtattatctccaaggtggctgtcggccgtgtatctcctcgtgaggtggttcagctaaaggtcgcgcttcgtgcgatcgagccgatcaaggaggcatgtatggcgagcggggaacccagcttatgccggatcggggagcaattaaacgcttgcgccttgatccgcgaccggattgagaaagagattaataacgatcccccttcgttggtcaataagggaggaattatagcgaagggtgtcaacgaggaattggatgacttgcgtgccatcgcttattccggcaaggattatttgttgaaggtacagcagcgcgagatcgaattgacgggtatcccaagcttgaagatcgctttcaacaacgtcttcggctattatatagaggtacgtaatacccataaggataaagtcccggcgaattggatccgtaaacagaccttggtgaacgccgagcgctatattaccgaggagttgaaggaatacgaggagaagatattaggggcggaagaaaagatccttgctctggagacccgccttttcaatgagctggtattggccttgacggagtatattccgcctatccagatgaacgcgaacttgatcgggcgtatcgattgccttttatctttcgccaaggccgcggaggcgaataagtatatccgtccggtcgtgagtgattccgacaagatcgacataaagggaggtcgccacccggtaatcgagaaacaactgcccttgggagaaccttatatcgccaatgatgtctatctggatgacgagaaacaacagatcatcattatcacgggtccgaatatggccggtaagtctgccttattgcgtcagacagccttgattacgctcatggcgcaaatcggttgctttgttccggccgagagcgcccatatcggtatcgtggataagatatttacccgtgtaggcgcctcggataatatctcggtgggtgagtctacttttatggtcgagatgaatgaggcttccgatatattaaataatatgacttcccggagcttggtgcttttcgacgagttagggcggggtaccagtacctacgatggcatatcgatcgcttgggcgatcgtggaatatattcatgagcacccgaatgcgaaggcgaagacgctgttcgctacccattaccacgagctgaacgagatggagcgtgcctttaagcggatcaagaattataacgtatcggtcaaggaagtagggaataaggtgatattcttgcgtaagttgataccgggaggaagcgagcatagctttggtatccacgtggcgaaaatggccggtatgcctaaaagtatcgtgaagcgttcgaatgagatcttgaagcagttggagtccgagaatcgtcaggaaggcatcgggggtaagcctgtaaaagcgatcgcgtctgccgccgaggggtatcagctgagtttcttccagttggatgatccggtgttgagccaagtacgggatgagatcaagaacttggacgtgaataatcttacccccttggaagccttgaacaaactgagtgaaattaagcggattattacggggaaataatccgcttgatcgtattaccgatgattggtaatcatttactttttaggtctcaccaacactaccacccggttgtcatcctcttccaatgtcgcggccacctcttttagtttgcctttcagctttccccttttatagtcctggcaaagatcggaagcattgatggtagaacacaattcgccttttgaattgatgggaggaaatgtcaccatatagatttctttcttataagaataatcatcgttgtatgtgatatagttgaaaaatttcttttcttgcgtatcgtatgcgaagtactttctcgggaaaccttctcctgtgttaaaatcatatatattcgttacgctttccatgaaataataacgatcggaaatcaatcttaagacgacgaaaacgcccgggtccatggtgtggatagggggtgttcgtgcgataagcgggcgcaaactgtaatcaggcattaaggtgtagaccgtatctgcagaggcctcaaatagaatccaattaccgttaaaaggaattatactgttatacggacctggtccagctgctcttgtttctcctttatcataaagtctttcaacgatatggaataattgcttctctttatatggaaccgtgatttctttcgttatacttccatcttgtttcgacacaagcaagaatggtacctcaaaattaaacttatcataacaaatcaagttgtccttgtcataatcaagcatttccacgtaaaacgaacttttctcgcttctttgattcagacttcgtttgaaatttccttccaaatcataaacccttatctttttcgcatgaaaatcatttacgaaaatctcttcgttttcttcatctaacgaaaccgatctcatagacacgtattcttctccaccttgtcccttgcgatttattttgcgaatagcttttccgttccggccatatacgaaaatattgccatcatcgtaaaagtttgtcacgattatgtatttctcgccaaccgcctgcacgcatgcccgattgataaactcatcgtttgtttccagcggaatatactccacatccatgaagtcttgaaggaccaactcttttttggttgaataactatcgtttacatccacggttataagaccatcggtcgatgaatggtcgcctccacatccagccattacaaacaggatgattatccctgtaaaaatgaatcttttcatacgcgtatgatttttgtttaacttatggtggtgaagatactataaaaagccgatggttttcacgaaattatcctattatttgttgatctcactggtaatttcttgcacatcttggagcgtaaaacgccctaacaattgcatgacgctgaagctcccgtcgtccatgtcggctatcatgatcaactcctgtatcagttctccttgttgcttgacgtagaaattggctttggtctttccatcttttactcgcatgagttcttcatgatcctttccgatcaaggctttgaactcacctcgcattcgttcccttaaatccgctttttgggtggtgagtatttgcagggattctattttccctttcaggttggcaaggttgagtccggcggtttccatgaccggcatcatctgaaacatctttttggagatatatacggaagtaacatcgtccatatccgcatatttgtcgaaaagcttgttctgggcaaaacagatattcacgcagcagagaagcagtattgtatatagttgtttgagtctcattgtattaatcatttaaatgtttatttacgatcttgtttatttttgtgatctcttgactggcttcattgacctgcccgagacctttgtttaaattcctagacatgaacgccaaggcattttgggctacgacagctgcctcttcaggatcggtaaaggtatcggccataacgggagccggacgatttgtctccgtgaagatgaggaatagggcgccaagaatagcggcggcgattccgcttatccaatagaaggaacgtcttcgtgagactcggggagatatctcttcttgggctaggaagtcgatttgtcgttccagcctttcggaaagtccctccggtaaggctaaatcctcttggagtgccttgtttattagttcatctatctttttatcatccatgacaacttgctttttctagtttctcccggatcaatttgcgtgcccgggaaagtaatgttcttatattagaggagctaagccctgtaatctgttcaatgtcctcataggaacaatcctcaataccacgcaggcggattacctgcctctggttctcggggagctgttctatcagttcttgtatacgccggatatcctctttttcttccaattccttttccggcgaggagtcggtcgttaatagaacggtctccaatgcctcttcgttgtctcttcggcttgctttgggcgagcgcaggaaatccagacaaagatttttgaccaatgttatggaaaatgcttccggattctggatatctcccagctcatcccttttattccataatttgcaataggcatcttgaagtatgtcttccgcatccgctttattgtctaataaggcataagcgatccgatagagtttaggatgaaagggtaggaaccgttgtttaaaaacatcaacgtccatcagtatcgcccttaataatttccagttttgtgctcattgattacccggtctagatcggacgggctgatctttcctttgatacggattaacgcattgtcgcttcctgtcgtgaatatgaccagttcacggatcatatcctcttttattttgacaagaactttcgtgcgactgtccctttcatttgccgtgaccatcgtctcataatcaggatctctcaggttccgtatggcggtagacagtcggtctttcacctcttgggcacaattatcaaattcaaggatctctataccgtttactcccattgtctcggtgaacaggctggctagcttcatcgttatgtttccgatatttacggaagtaacatcgctttcaccccggaaagcattgaataattgatccatcttctgctgcccgtatcctacttggctgataaggaggatggccagtaacactagtaatcttttcattgtaattgactttttcgttaatactatgtttttggatcgcccttcgtccgtgcgccttagagtgggggctttcacaaagaagacgggataagggatttgtttgttacaaaaataggcaaaaaagattagagtccgggtgtatttattctcgataggctttacggtaagaatgaaaagttccatagattagtactcttattttatatcctgattattttttcttcagtttaggtgtccatatataggcgacggaatcgtgtaacctgatatctttaccatcgaaatataacttataggaatatttatatcctttattccagcaggtgccttccggaatgatgtatttgtaagttcttccattgatagtaaagatcgcctcaacttctttttcccggataggagagtaggtagggactatacggatattttgctcctccgctttcgcgtgtcgtaaagttacggatggatctattgtaagtaaagtggctttatatgccccgggagttcctttgatatttccggttacgatatccattgtcccggtatattgcaaggtattacctcccgcacggttaccgatctgtatggaggttagcttgaatagcccgttgatgtccgaatcttgatatatttcgaatgagagaagtgataatgcataattcatggagagtttcgcgagcggagatttacggttgacctctttttggccttgcgagagcctcccatattcataagaggggggttccgccgcgattggggatattttgatcggtatggaggtaggatctaacggtatttgtactttataaggtgagtaagcgtagatcatgactggtcgattagatctgaggaatacctgcggtgtttgtttccattttaaagaaccttttgatgagcctacagcctttgattttacgtttttataaagagatgcgcctttatataaactgtcttgattaccataggttataaataatcctatttcggacccttcgggcagaatttcggtgaatactgaagaacctgccgtataggaccgggtggtcatttcaagaactgactttcgtgcggttgatttctctttggacatccactgctgattttcatgacatccggtaaagatgattaacaagatcgtaattaataataatttgttcattttgtctaatgttttaatggaacctttcaaacaataaacatttgagccaatatagtttattattctattactattaattattattcctgttataaaatgatatttttatatattatatagtaacgattgttttatcctcttaatacgcaaagtaacctgctttattgtatactataataatcaatatatccaagagatataaagttattattaaacgggtctcgtccttgtaatagtcaaatagaagagtgtttttggcgataagttgagagggaatgataacccttgaatgtaaaagggtatttggacgagacccgttgtttctcttattgagagaatatatagagtcggctgaatgaaaaacacatcgtacgggtagtgaccccgatggtctaattcgccggaatgatagagccaattgttattttcagtgtagttgccggtggcaaacggatcaaagcttgccacggcattacaccttaataaccacaacataaaaaacttacatgatattgccaatcaatccttcgtcgttacccggtaaccagtctgtgatagagacgtctcgcaattgtaacgaccttccgttaaagcttagcttatataaatattttttccctttttcccattgggtgttagcgggtatgtcaaatttgtaggtttctccgttgatcgtgaataaggtctccacgtctccggttccgatcgtgccggaaggtggaattaccatgagccgcataggatcacaatatttctcgttgatgagggtaaccggattcgtcaaggataataccgtggatgcggacgtgctacgggcggtagaaccgatgatatcgcccgtcgtgatatcgagggttccttcgctgactaaagttgttccaccgggcttatttcctacttgaacggaacttataataaaggcacctgtcttgcctttgcttaggttcaactggaaagatataagcgatagggcatgattcatgctgagtaatacaagtggcgaggtactgttgaccgctttttgtccgatcgcatgggttccatacatataatcatcggtctccaatgcgttcggggccagtttaacaggtatctgccgggcgttaaaatttatatcttcttgatatggataatatgcgtatatcgtagcttcattagagtcaaggatcacttccggactctgttgccaccggatttttccattcactctataagcttttacgcttacgtttttataagtggatatgccattgtataaatcgtcgactgtaccggacgtgatttgtagtccgagcatagagccttctttaaattcttgtataaaattggtggattttgtagttaggatacgagtcgttatttggagtggtttttcattccagccgatattctcaagacctccgaagtctttgtcgttggagcaaccccaaaagcttaaaatcatactggtaaagagtactaaatttctcattattttacttatttttgtgtgaaacttctggatgcaaatatcgggtggttaaggggaaagggaggtgcatacggtctaaaacgtcggtgaaatcgtataaaattagatcgttcaaattgtctaaggcgttcatattgttaactgaggggtcaaaaagaacattcgggggggcgtattgtttaatagataggaggtagtgttattatgttggataaaattcagtttctactaagcttacagatattaggcttttgtgtttttggtggtattaccctgctactacgggcccgtgagaatagggcaaaacagattttggggtggagtatgttattatgggcgtttttagcggcggtacgagtatcggttaacctgtatttagaggattcaaaagagatatttcatccggatgtgctgattatgggatgtattgtggtagctacattagcttgttacgtgatagaagtgttacgaccttgctatatgaccgttcgccgtttctttatttttaccagtccgatatgggtattgggtatttcttttttgatttaccggctatccggtggaaatattcatcgttataactcttttggcgaggtattcgataccttgaatctggatgtggttataaggcttttgattttatttttcacgcttctgtatatgatcgttcctatttatctgatcttgcgctatagtgagggatttaaggtgtatttaagggaaaatgtatcggacccggaagattatgatctggactggttgaaaaagaccatgctgatcctttcttctatgtatattttttatttggtattgttgtttacggatcgggttagcctatatgtaatcgacaaaacgtttttattggttttatggtactatttcttttataaggccttgttcctaaaggttatccatttggatcacacattcgagagcggatggggattacccgatttggaggaggatacggatgatgatcaaggtagtgaggaacagaaaggcatcatacgccaaaggtatgttgaggaagtacaggcgtggtttgaacgtgaaaagccctatctacgggaagatttacgcttaacggatttacagcggatcttcccgatgagccgctcttatctatcccaattgtttaataaagaattaggttgttccttctcggattacgtaaaccatttcagggtagaggaaagcaaacgtttattggaagccgaacctctggccagtatacaagagatagccgaacgttcgggcttccattctatcagtacgttccgtcgtgcgtttattaagcagacaggggttattccttccgaatacaggagagacgggaacgagtcaatttaaccggtaactgacgaaagcgaatcgcttgctatcgggtgcccaagagtttacgtttatcgtaccttgcccgccgaatagtttgactaaagtcttaggttctccgccctcggctggcataaggcgtaactctacgtttttattggcgaggtgttgtccgggttccagatcaccttttgtataggtgatgaaaacgatttgttttccatccggagagatgtggggaaaccaagaatttcgggtctcatcgaatgtcatctgggtttgttcggaaccatccgccttcatgcgccagacttgcataagcccggtacgtacggagttgaaccagatatattgtccgcaaggtgagtattcggggccatcgtccaaaccttcggctgtcgtaagacgtttttcttctccgcctagggcaggaatgacgtaaacatcaaaattaccgtttctctcggcgcaataagcgagttgttttccgtcggggctccacccgtgtaggtagctaggaccgagtggggtaatcaatcggggaacacctccttcgaaaggcagggtatagatacgcgaccggccatcttctttcgttccgttactgatcgctatttgcttcccatccgcggagatcacatggtcgttgttgcaacgggttgcgtagtcgctattgattaattgcggctctcccggagattccggagagagcttatataattttcctccactattatatacaagccaattaccatccggagtccagttaggtgcctcgatcaaaaaagggaattccttgacaacggaacgttgcccggtcgtaatgtccatcacttccagcacactagtcacattctttttttgggcatgcgtacaaaaaacggcgatacacatacaaagtacagaattgagaaaacgtttcatatacatatagatttaaaggatataagaaaaccgggtaaaattagctttacgctattttacccggtttcaaagatataatttatttcgattactccttatacattgaaacggaaatgcatgatatctccatcttgcacaacatattccttaccttcaacgctcatctttccggcctctttaacagcagcctcggagccataagcgatataatcctcgtacttgatcacctcggcacggataaatcctttttcgaagtccgtatggataacaccggcgcattgaggagctttccagcctttatggaacgtccacgcacgacattcgtccgatccggcggtcaagaaggtttgcagattcaataatttgtaagccgatttaatcaaacggcttacgccagactcttccaatccgatctcttgtaagaacatctggcgttcctcataggtatcgaactcagcgatctcgctctcgatcttagcggcgactactagaatctgggcatcctcgtctttaaccgcctcgcgtacggcatctacatatttattgccgtttacggcgctagcctcatccacgttacaaacatacatgacaggtttatccgtcagcaagaataaatcgtgggcaatgcgttcctcgtctttcgtatcaaaagaaacggtacgtgcgctttttccttgttctaaagcctctttgtatttacaaagtacctcgtaagcgatcttggcttgcttatcacctccggtttgcgcttgtttttgcaccttggcgatacggctgtctatcgtttccaaatccttgatctgaagctcatagtcaatgatctccttatcacggaccgggtctacacgtccgtccacgtgcacgatattatcgtcgtcgaagcaacgcaatacgtgcaagatagcgtctgtctcacggatattagccaagaacttattgcctaatccctcgcctttactcgctcctttcaccaatccggcgatatccacgatctctacggtggtggggatcactcgctgcggatgttcgatttccgctagtttattcagtcgctcgtcgggtacggtgatcacgcctacattcggttcgatcgtacagaacggaaagttcgctgattgtgccttcgcgttggataggcaattgaaaagggtagactttcctacgttcggaagtcccacaatgccacattgtaatgccatattattatcgtattttttattatcaatctgttatatagtcgctccaagcgacttgttttgagttcgcaaagataatcaattttaggctgatacggttattttcttaggctttctcttcatgcttaaccggttgcctcatcgattgtttgtttaataatgttttaacgagtttgttcataggcttctttactaatgttattttttacttaggttgttctctcatatttccggtaaaagaaagtcaataacaagaatccgataaaagcgaatccggaacctatcaaggccggatatttataaccaaggccgacctccaatggtaacccaccacaataagctccgatagcatttcctaaattgaacgcaacttgtacgctggcggctcccagcatctctccacctttggagtaacggatcaataatacttgttgagggcttgagacggcgaataatcccgccgtacacagacacatcagcaagacatttaaccaagatatttgtgccaagaagaagacgagcagtagggctacgcaaatcatgccttgcgctatggccgctacccgtccgggcatatatttatcggataggcggccactgatcaagttgcccgctaccataccgaaacctgccaataccattaaaacagtaaggctttcggccgagaagccggatacttgtgtcaatagcgggctgatatagctataccagcaaaatacacctccgttacctagcattgtcgcccctaggattaaccatggcgcttgagtcttaagaaaacgaaattgtcctttaaagccagtatccggaaggttctctaccataggtacccatctccagatgtaatataagatggctatgccccagcaaccaaccagtaagaaagtcagacgccacgagagcatggtgctgagggccgtccccaacgggacaccgaataggttggcgatcgtcatccccgctatcatgatagagacagcctcggagcctcttcctttatcagcaagcttttcggctacgatggagccaacaccgaagtaagctccgtgaggcaatccagagatgaagcgggctatcatcaatacccagtaattagacgctaatgcggcgcataaattaccgatcatcataatccctactaaaacaagcaaaatgtgttttaatggatatctacgggcgataatcaacatgggagcgcctacgcaaacccctagtgcataagctgagatcagatgcccggctgtagcaatgctgatgtgtaaatctttcgcgatgtcgggtaggatacccatcattacgaactcggcaatccccagcccaagggtaccgaaagctaaagcgatcaaactttttttcataacctaaaatgctcaacaatcttttcgagcgcaaatatagtgtatagtatacattattatttgcttttcggaatgtttttaggggaaagttttgcgtttcgtgatgggctgttagggtcttaaaaaaacatgtacgtctttcaagaaaaagtcgtacgtgttttcaggaaaacacgtacatgtttttttaaggggaattccggcattattttaatgcgcctccaaccagttttctccctcgccgcaatcggcgatcaaggggacttgtagtttcatgacgttttccatttcctccagcacgattttctttacctcctcggcctcctctttgtagacattgaagtttaactcatcgtgtacttggaggatcatcttgcttttcaatccctcttcctcaaagcgttcgtaaatgcgtaccatcgctagtttgatgatatcggcggcgctcccttggataggggcattgattgcgtttcgctcggcatagccgcgtacgacggcgttgtgtgagttgatatccgaaaggaaacgcttgcgcttgaaaatggtctctacgtatcctttttccttggctactttgatgctctcctccatgtattccttgatgcgggggtaggtgctgaaataaccgtctatcagttccttggactcagaacgagggatgcccagacgctcggcgagcccgaagacggagatgccgtaaatgataccgaagttggcggttttcgccttccggcgcatatcgctggttactttttctaccgggattccgtagatcttggcggcggtagcggcgtgaatatccgctccgctttggaaagcctcgatcatatgcgggtcaccactcaggtgggccatgatacgaagctcgatttgggagtagtcggcggagaagaagaggcaatccgcattatccgggataaacgccttacggatcttgcggccaagatcgtcccgtaccggaatgttttgcaggttcggattggtagagctgaggcgtccggtagatgttaccgcttggttgaaagaggtatgtatctttccggtctgcggattgatcaactcgggtagagcgtcgatataggtacttaataattttttaagtccgcggtattcaagaagcttgccgatgatgggatgtttgctgcgaagtttctccaatacatcctcgctggtactgtaaccgcctgttttggtcttcttcgctttctcgtccagcttcaagcggtcgaaaaggatttcgccgacctgtttcgtggagttgatgttgaattccgtgccggccagctcgtaaacctcttgctccagtttgttcatggaggcggtaagttcgcccgaagattgcttaagcgctactgtatccagcgtgacgccggtagcctccatttccactaatacatatattaatggcatctcgatcgtggtgaagagggattccagtccttctttcttcaactcgggtgcgaaataattctttagcttgagcgtgatgtccgcatcctcggcggcgtattcggcgatttgctccacgggtacgtttcgcatcgataactggttctttccttttgggccgatcagttcctcgatgtggacggtctggtacttgaggtaggtctccgctaggtaatccattccgtgccgtaattccgggttcagcaggtaatgggcgatcatcgtatcgaacagaggaccggctaccttcacgttgtatttacgaagtaccaaaatatcgaatttgatgttttgcccgatctttaatgatttcggattttgcagggcaggggagaagcgttccactactttcgccgcctctactgagttggcgggaacaggaacataccaagcctcgttttctttcacggcgaacgacattccgaccagtccggctttcaagggatcgatgccgtcggtttccgtgtcaaaagcgaaaaattcttgacccaataaaaagtgggctaaatcggcttgtttttcctctgtatcagttaaataatagttatggggggtggactttaagtccgtgagaatcgattttttgggctcttccgtactctcgggcgtaaaaatcgcgaacaaatcgccttgaacgggacctttcggagcggctttgaccggctcagaacttagtttgttaataaatgttctaaattccaattctgtgtaaatctcagtcagccgctcttcgtttggcttttcacgaacgcaacgggcggcatcaaactcgatagggacatccgttttgatcgtcgccaagaatttggagaaacggatttgctcggcgttctcctccaccttcttcttttgcgcgcctttcaacttatcagtgttcgctaacaggttctcgatgcttccgaattcggtcagtagtttttgagcggtcttctcgccgacacccggacagccggggatattatcggaagcgtcgcccatcagtcccagcaagtcgatcacttgctccgtactcgtgaggccgtacttgtttaagacctcaggcacgcccatgatctcgtaatcgcctccgaatttcggacgatacataaatatatgttcggacaccaattggccgtaatctttatccggcgtcatcatgtacacctcgaagccttccttctccgcctgtttggatacggtgccgatcacatcgtccgcctcgtagcggggtacttccagaatcggaatattgtaagcctctatgatttctttaatgatagggacggattgacggatcacttccggcgtctcttcccgttgtgccttgtattgctcgaaggcctcatggcggaaggtcggtcccttcgggtcaaaggccaccgctatatgagtcgggttctcacgttttaatacatcctccagactgttgataaaaccgaaaatggcggaggtattcacacccttggagttgatacgcggattcttgatgaaggcgtaataggagcgataaattaacgcatacgcatctataaggaataacttcattacttttaacacgttttagtgggacaaaatctgggtaaatgtacgaaaaaactcgcttactcgatagtttttgttacttttgcgaatctttgcatggaattatggatgaaagaaggaaaatagaagaaccggtttccgctgaatttgaacgtttcaataaggatttcgaggcatctctacgcagcgagacgacccggttacaatcggctatcgacgttatactgaattctaccgggaagcatgtgcgtccgttattggtgctccttaccgccaaggtctgtggacaggttacggataacacgatcaattccgctgtcttgctggagcttttgcataccgccacgttgattcacgatgacgtgatcgatgagacgaagcaacgtcgtggcgttccctcattgaacgctatcttcgataaccgtatttccgtgttggtaggtgattatgtgctttctaccgctttgatccgttccatacaaaccggcgatttgcggattgtcgggattatctctaatttaggcagagacttgtccgaaggtgagatcaagcaattggagaccgccgaggagagtatcctagacgagaattgctatctgcaagtgatcaagaagaagacggctaccttgctttccgcttgcacggagattggggccatttcatcgggcgcctctgcggaggtgatcgctctttgccgtgagtttggcgagtatctggggtattgcttccagatcaaggatgatatctttgattatttcaaggaggcgaatatcggtaagccgacgggaaatgacattcgtgagggtaaggttacgcttccattattatatgccttgcggcagggtagggaagaggaggccgcccgttatttggatatgattttacggaaagatttcgcggcggagaatgtcgattccttgatcgagttcgccaaggcgaatggtggaatcgaatatgccgaggcccgcatgaaggaatatcatgataaggcggtcgatgttcttttgagattgccagagtctgaggcacggacatccttgatccagctggccgattatatcatgactcgctccaaatagaaattcctttatctattagttgtagagagatggctcttgttcgtaaaaaagtaagtatgcttcaatagccaatgaagttaacttacttgacgaagtcagttaacttcgatgccaaggtaagttaactgactttgagagtgcttaccggacacaggattctaagccatctgcgcccggtttattagaatggactatttcccgagtcgtttttctatatcaccgaccagactgctcgctcctatacggaacaaatctttgttaagccattcatcgcctagtatctcctttacgatcgtataatatcgaactgcgtcttccgccgtgcgtacgcctccggagatcttgatgccaaccttgtttccggtgatggaatggtaggttttgatggccttgcacatggtataggcggcctcgaaagtggctcccgggtatcctttgccggtagaggtcttgatgaagtccgcgccggaatacatggctaggatggatgctttttggatgttctccgttgtgactaaagctccggtctctaagattacctttaaatgggcgtggcgacagctctccttgatctcttgcaattcctcggtcaattcctcgaaattgtcttccatgaaatagcctaggttcatgacaacgtcgatttcatcggctccttgcatgactgccatggccgtttcggcgatcttgacttccgtaaatgtctgtgaggaaggaaaacctccggcaaccgacgcaatcttaacctcttgcgcagtaagtgcctgcttaaccgtttccacgaataggggatagacgcaaatagcggctacgttcgggacatccggacgagttccctcgaaatcatttaccgtgtcgaccatcttccagatgttttctttggtatccagacaggtcaatgaggtcaagtcgatgcagccatgaatcgttttcaatacttccggtgtaaagttttcttggaaatgtttctctaaaagagcgtttacagtctcggtggtctgggtatccggcagggccggctcaaacttattgaaagcttcatgataacggtctatctgtacggaatttgattcgtgttcatgttcatgatgatgatcatgtccacattcgcaatcgtgatgatgtgccatatgcttatagtttttgattgtttatatgtcgttctttatctcggtctgttttcttttggagattcttctcgaaagcggcggtaagatctactccggtctggttggcgaggcaaagcagtacccataagacatctgccatttcatcgcctaaatcccggtgtttgtcactttccttgaaagactgctcaccgtaggtacgtgccatgatccgggctagctcgcccacttcctcggtgaggatggtcatattggtaagctcattgaaataacggaccccataggtcttgatccaagcgtctaccatttgctgggcttgttgtaaagttatatctgccatacttattctttattttgagagtcgataataatagtaaccggcccgtcgtttaaaagttcaattttcatatcagctccgaatgttccggtttgtacaggttttccgagttgaagccctacctcttcgcaaaaagctttatacatcggaatggcgatatccggtttagacgcttttaagtaggaggggcggttcccttttttcgtagaggcgtgtaaggtaaattggctgacaaccatgatctcgcctcccgcttcgataaccgagcggttcatgaccccgttttcatcgtcaaatatgcgtaggttggtgatcttttttgccaaccattcaatgtcttcttgcgtatccttgtcctcgataccgactaataccaatagcccctttccaattttggacttaagctgtccgtctatcgtgacggaagcgtgctgcacacgttgtgtaactgttctcatcttgttcgcttttgttctatttttgttcgctttctgttcgctttccatccagtccctcttgtagtgccttggctttcgcctcgccaatcacggatttcagttcctcgaagcttgcttccttgattcgttttacgcttttaaagtgacgtaaaagtaatacttttgtcttttcaccgatacccttaatggtgtctaattcggattttgtctgggtcttacttcgtttatccttgtggaaagtgatggcgaaacggtgtacctcgtcttgtatccgggtaagcagatggaatagcggactgtccaaacgcatgccaacggttacgggtgggaacccgaataataactccgaggtccggtgcttaccatctttcgctagtccggcgattggaatggacaagcctaattcatcttctaccaccgagcgaaccacttccatttgcccctttccaccgtctgttataattaagtcgggtaggggagatcgctcctcgattgcccgcccgtaacgcctacggacaacttctttcatagaggcgtaatcatccggaccgactacggtctttatattgtatttacgatactcctgcttggacggttttcccatcttgaataccacgcaagccgctaccgcatcgcttccctgtatgtttgaattatcgaaacattcgatatgagcaggcaatttctccagatgcaaggcctcttggatctctttcaagatacgggtattccgttgttccggattcaacttttccgcttgcttcaagcggtcaaccttaaactgcttgacgttcatctcggataaatcgagcagtttctttttatcccctctttggggaatggtgaaggtgacattctctagttgcatatccagcttgaaaggcacgataatctcccgggcggtgcttttaaaacgattccgcatctcgataataccgaggcttaacaattcctccttactctcgtccaatcgttttttatactcgaatgtataggcttgtacgatcgccccgtttccgatatgcataaagttcacataagcggaatggtcattctctatgatcgtgaatacatctatattatgtagcatcggggttacgaccgtagatttagaacggtagttctcgatgacttcgtatttttccttgatcttttgcgcttcctcaaacttgagctcggcagcgagcgattgcatctcctcatagaggtgtttgctgatttgcgagatgttgcctcgcagaatctctttgatctcggaaatattttgctggtattcttccaatgattgcaagccttcacaaggccctttacaacgcttgatatggtattccagacaaaccttatagcgtccttgtgcgatggattcgggagtgaggggatatttacaagtgcgtaaagggtaaagttcctttagcatttgtagcatcactttcgccgtgaacaaagagggataaggaccgtaatattgtgatccgtcccgaacgatgttccgggtttggaaaacccggggaaagtactcgttctttaccacgatggaagggtaggttttgtcgtccttcaataatacgttatagcggggacgatactgtttgatgaggttgttttccagtagtaacgcgtcttcttccgtatcgacgactatatatttgatatcccggatttgcttgactaacacacgggtcttattgctgtcatgtaccttgttgaaataagaggatacccgtcgttttaggttcttcgccttgccgacgtatataatcgttccgttttcatcgaaatactggtagcatcccggcttttccggaatgaccgataggatcgtcttgatatgttcgtctttatcggctatcatacgaatagggaagtaaattggaatgtctcgctattgaacaaacctttgttgctaagttttaaggatgggatcgccagcaatcccataaaagaaagcgtcatttgtaatgaatccatcggggattttaatcgcttgatcttttcctcgatctcttcgtaacggcggctcgtctcttccaatgattcgtcgctcatcaatcccgctaccggcaaggacaggagagtgacttcgtccatgcagctcacggcgattcctcctttcgcttttatgaccacattgatcgcttgcataagctcgaaatcggttacgcctatagcgatgatgttatggctatcgtgggagatactttgagcgatggcaccgagcttgagccctgttccttttataaaggtaatagcgggaggagccgtttgatagcgatttagaataacgagttttaaaatgtctcgttctgtatctgattctacaaatccatcgaatgtatgtacaggatatagttcttctttcgtgattaattcgctgtcttcgcaaacaatgacacgcatctgttcccctttcgcttttaccgctagcttttctaatgtgatcggtttcgtgtggaaattattacgatgtataggcttttggagtggaagcgtgcatttctctccatcgtatacacaggttccttgtatataggttgcctgtatggttagatcctttaaattgtttacttggataaaatcggcggagtctccctctcgtaagaaacctgcggggattttatagtgcatggccggattataggaagcggcccgtaatacatcatatagatcatatcctaaatccagcgatttttttaccatcctatttatgtgtcctttgtttaaaaacgaaggatgtgcgtcatctgtacagaacatgatttgttcgggatactctttcaatagcggatgaagtgcgtcaaagtttttcgccgcgcttccttcccgaataagaacatgcatcccaagctcacatttctcacggcctttttctagatagatggtttcatgatcggtggaaataccagactcgatatatgcctttagcttgggacctgtcgctaggggataatgtccgtctatgggtttacccgcttgtttcgcggcttctattttgcgcataacttccggatctttatttaagactccggggtaattcatcatctctgccaagaagtgtagatcctctcgttccaacaaacgagcggtttcgtctgcgtctatgatcgcaccggaggtttccataatcgtagccggtacgcaagatgggacaccgaaccatgtgtagaaaggaatccctttcgcgttgtcgagcatatattcgactccttcggtacccattacattcgctatctcatgagggtccgccacggcaccgatactgccatggcgtacggctgcgtgaatgaatgccgtaggggttaccatgctactctctatatggacatgtgcgtcaataaagccggggaggaggtaatatccctcatcttgtccggtaggggttacctttccgatatgcccgtttaggattgaaatctctgccccgaaggtgcgcctgttgattatatctaccagatttcctcgtataaccagtgttttagcttcattcatttgaatatctcctttaatatgtttcacgtggaacatttcgtgttttatcttccgagtagtaccaaaaggatgttgatgtcgctaggggaaatacccgggatgcggctcgcttgagcgatcgtgtcgggatctatccgggtcaatttctggcgggcttccgtagataaagactggatcgagttgtaatcgaatttacccttgatccggatattctctaaacggtttatcttatccgctatgatttgttctcgcttgatgtagccgctatacttaatcaatatctcagcggcctcgatgatctcttccttacgggaggccgggactttgtccagctccgcacgaagggccggaactagatctgcgaggttttccaatgtagtctgcggacggagtacgacatcgaataatttgcaaccatgggataggggggctgtacccagtttctccaaaccgctgtttatatattgaggctttacggagtaggtctccgcaaaacgaatgatagcgtcacggctctcttttttctctcgcagtaaatcgtagcggtcttgtttggccaatcccatttggtaggatttctcggtgagtcgcatatccgcgtcgtcttggcgtagtaagatgcggtattccgcacgagaggtgaacatacgataaggctcgtccacgcctttggttaccaaatcgtcgataaggacaccgatataagcctcgtctcttccgaggataaaaggttgtccgccgtggcaattgatgtgggcgttgatacccgctaccaaaccttgtccgccggcttcctcgtatccggtagttccgttgatctgtccggcaaagaaaagattacggatttgtttggtctccaaattatgtcttagctgagtcgggtcgaagaaatcgtattcaatcgcatatccgggacgatagatttgcacgtcacggaaagcggggatcgcttggagcgcacgaagctggatatccaagggtagggaagaggagaagccatttaggtaatattcttgcgtggcctcgccttccggctctaggaatagttgatgctgcgtcttgtcggcgaacgtcacgattttcgtttcgatgctgggacaataacggggaccgatacttttgatctgtccattataaagaggagagtcggggagaccttcccgtaatatatcgtggcaagcctcgttcgtaaaggtagtccagcaactcaattgttttaatttacgatgactggtatccatgtaagagaacttatggaaatcgttttcccccggttgttcctccatttcatcgaagtgaacgctccggccatcgatacggaccggtgttccggttttcatgcgatctgtttggatacctaaagagacaagttgctcggtaagtccggtcgccgcaggctcggcgatacgtccgccccgtatctgggttcttccgatatgaagcaggccgtttaggaaggtcccgttcgtaagcaccaccgctccggcacggaatacgacattcattcccgtacggacgccgcagacttgtccatgctcgataatcagttcttgaaccatatcctgccagatggatagattcagcatattctccagtatgccccgccagcaatcgataaaacgggcacggtcgctttgggcacgcgggctccacatggccggtcctttgctacggtttaacatacggaattggatagcggtctggtcggtcacgattcccatatatccgcctagcgcatcgatctctcgtacgatctgtcctttggcgattcccccgactgccgggttacaactcatctgggcgatcttgttcatgtccatcgtgatcaaaagcgtctttgatcctagattcgccgcggcggcggcggcttcacagccggcatgtcctgcgcctactactattacgtcgtaattgaaagtcatttttattcccttttattttacgcgaagatagtgagtgttcgtgaaagaattcgtttatatttgtataataaatacatacattgttttcaggtttaacgaactaaagatttaagctgctatgaattctattcaatgccgtatccttgtttttctggttttactgacctcttgcttcagtccggtttgtgggaaagataagaaacctcgtcaagcgatcgagaagttatcgatcgatggtccctatctattgaaagccgatgatggtagtatgcgtgcgatatctgtagacgggaaaggccggttattggataagcattataaaagtatacctaccaccttttcattcgaggtgttttccgataacggggagagattgtttccggtaaccatacactccgtctctcgtccggaatggaaagatgtgcaacctgagaagacgtttgttctttcagatccacatgcgaactggtcttgtttcgcctccctgttaaaggcgggaaaagtgatcgatgcggactataattggatttttgggactaaccaattggtgataatcggtgacgtctttgaccggggcgtggatgtactccctatctattggttgatctacaaattggagaaagaagcggaagatgccggtggaaaagtgactttcttaatcggaaatcatgagaccatggttctgggaaatgatttgcgatatacgaagaagaaatatactcaattggcggatactttaggaatgacctatccggagctttggcagaaaagcgagttgggacattggttgaaaactcgtaactctatacaagtggtcggagataacctgtttgtccatgctgggttgagcaaggagtttttagaccggaattacgatatccctaccgtgaatgagatcgtgagcgatggtctcttcttaacgaaaaaagaacgtaatgcagataaaggctccgatctttcttttatgttcgctacgtatggaccgatctggtatcggggtatggtacgtagcgcagataagtatcatccgctagaccgggatgatttgcggaaaatattagagaaatataatgtgaaccgcatctttgtaggtcataccattttcgatgatatcacgactttctatcattataaagtgattgccgtgaatgttgataatcaagaaaacaaggagaaggaacgaggccgtggtgtcatgatcgagaaagacggttctatgtttgtcgtatatgattccggaaaacaagagccgttattaaccgagtaatatttggtgcttgagctgtcacgactgctaccatcatggtagaggaagaagtgcctcccctaatgtgaactaatgagatagggagtgcaacttttatgtatcttaaatcatctataaatatagatatgttttaaatgtaggagttatgaaaaaagttgtattactgtttatcttgtttgttttctctttgtcgcaagctgatgctcaagagttccattttattcctaggattggcttgaatttggcaaatacttatcccgaaagttttgcggacatgcgtccggggttaaatattggtgtggcggaggaaatacgttttagcaaactgtttgctttagaaccgggtgtttattattctatgcaaggttatcaaaaagaaaacgctaaaggcgagacagcccggctaaaggcggattatttaaatattcctatttacgctaaattttatttgtatcggggattccatcttttcgcgggcccacaagttggctttaatataagggcgaaagcttcgaattatattttcgtctcgggtcctactccggtgcaccagagcgagtacgatttttccggtgataaaaaagaagagatccgaaattgtgatttctccgtttcaatggggcttggctatacctttgacatgggattagttatctccgccaattataatttaggatgtactcatttctttaaggagccggaatactcattcggtggaagcaatcattttaggggaaaagatcataatggggttattcaattcaatctaggatggcgtttctgatctccagtaaatcgtgaattaagagagatcgcttgttcctcgttcagccttgcggcatggctacacaggcaatggactgctttcgggcattgctcgtccgtggcgtagcaatacgtgtaatcgtaaggtatgtcttctgttttcatgttgtctgtattatttttatttatttcaacaatagtctgctctcaaccgcctctaatatcttcatttgctggatcgctatttgattaagctttattagtcgttcacgctgggtaagtccttcatcaataaatacagcattcaggctttccatattcgataaacagataagttcattaatagtcgcatagtcacgaatgttaccttttaattcgggattggcttcccgccattgtttagcggttgtgccgaatagagcgacattaagaatatcggcttcgtttgcgtatataaagcttacctgttgcggggttaactctatggggatgagattatgcttgatagcgtcggtatggatgtgatagtttattttggagagttctcgtttggcagtccagccgatttgtttctgttcctcttcttttaggcgttgaaactctttaacgatatataattcaaattcaacagagatccaacttgcgaatttgaaagctatatccttatgagcaaaggtgcctccatatcttccggatttggagataataccaattgccgctgttgtatttatccatttttgtggagaaagggtaaaagcatttaaccctgcttcctttttaaacccctcgaattcgaggggtttaaaattaggattatataaactttcccatatacctaaatattcaatggtattacgattacgcatccaattgccaattactgctgtcggatcatcgcttttgtactttgcgatgtcggtaagtgagatatagtcattcttatttatagatatgatcatgacacttgtattttggactgtgattttctccataattttcttcagataagatttgtagtataaatttgtttctggttaacatctctttaccgacattcctccggcaagatcgctaacgctctgttctcgttctcctccatgatctcccgctcgccggggcctttgtcgttgataccgcaaaggtgcaggatgccgtggatgatggtacggtggagttcctcgttataatccgtgtggaatgtctcggcgtttgtcctgaccgtatcgaggctgatgaacaggtcacccgagatcttatttccttccgtataatcaaaggtgatgatatccgtgtaataatcgtgttggagatattggcggtttacctccaagatcttctcgtccgagcagaagatgtaactgatatcgcctgtcttcttcccgtaggtctcggctaccgccttgatccatccgctgaccgcttttttcttgattgccgggagctggatatcctcggcgtaatatgctattgccataaggtctatttatcgtattgaaatttcgttacaaatgtaatcaatagattttaaatagattcatttcaaatctattgattgtatagaatgttaaaagaacaggtaagccatcgctatcgccgctatcgccccggccagatccgctaacaaggcgcattgcaccgtatagcgggtattacggatacctacgctaccgtagtaaagagcaactacatagaatgtcgtatcgcaagagccctgaacgatggatgacaggcgaccgacgaaagagtccgctccatacgtgttcatggcgtccagcatcatgcccctagccccgctcccgcttaacggtttcatcaacatggtaggtagcgcttccacgaaatccgtgttgagccctatcgaagcaatgccgaaacgaacgccttgtatgatgaaatccatcgctccggaagcccggaagacaccgatacctactaggatagctaccagataaggaataatcgttatagcagtctggaaaccttctttcgccccttctataaaagcatcatatacattgatctttttacgcatgccgctgatgataaatccgcagataatggtaaaaagaagcgtgttggcgaataaagtcgaatacaaggaaacttgctcctgttccatcgagttaaatagccataccaggcctccgataaataatcccagtcccccgaaaaacaggactaggttccgttggaggatattgatcttctgccgtacgcaaaccgctaaaatagcgactaaggttgatgtgaatgtagcgagcatgatcggcaggaatacgtctgatggattcgccgctcctaactgcgcccggtacatcatgatggtgatcgggatcaaggtcagtcccgaggcattgatgcataagaacatcaccatggagttgctggcggattctttattcgggtttaattcctgtaactgttgcatggctttcaatcccattggcgtggcggcattatccagtcccagtaaatttgccgataggttcatgaagatagaaccggtcacgggatggtctcttgggatatccggaaaaagcttgctgaatacgggagccgccaatcgtgcgaacgcttgtatcaccccccccttctcaccgatcttcatgatgcccagccaaagcgacaagatccccgttaatcctaacgaaatctcgaaacccgtcttggccgaagcgaaagaagcgttgataatctcggtaaaaacggcggtatccccaccaatgaccagtttacctacggccacgacgaaagcgatcaagaagaaagcgatccaaatatagtttagtaccataataaatatatattggtcacaaatttaggaattaattgccaattgatttgtatttttgctttttgaataacaaatagatccaagatgaagatattagtgacatacgacatgttccgcgagggatttaccgagttggaaagtaagtacgaggtaacctttcccgaaggaagagattttacgtatgaggaggttttcgagatgataccggagtacgatgtgctctgctccatgttcgatttcccggtaaacaaagagttgatcgaccatgcgtcgaaattgcggctgatcgctaactacgccgttggttataataatatcgatgtggcctacgccctcgagaaaggcttgacggtggcgaatacgcctgatcctgtcacggcccctaccgccaatatcgctttaggcttgatgctggataccgcccggcgtatcacggaatgtgatcgtaagctgcgtacgcttggtaaggacatgaaggtcggtgtactggagaacctcggtatgccggttaccggacagaccttgggcattatcggtatgggacgtatcggcaaggccttggcgaaacgggcgaatgctttgggcatggatgtgatctaccacaatcgccgtcagctttgcatcgaggacgagaccaaattgaatgttacctacgtctccaaggaagagcttctggcgaaagccgatttcgtatccttgaacgccccttatacccccgatacctaccatatcctcggcgaggaagagttcaagcagatgaagccttccgccatcctgatcaacacggcccgtggcccgttggtggacgagcatgccttggtaaaagccttgcgagaaggtacgattcatggtgccggtttggatgtattcgagtttggagactatcctctccccgagttattggaaatggacaacgtggtattaacccctcatatcggcacccagacgatggaaacccgtatcattatggcacgcacggtatgcaacaacgtgatcggtttcttggagggcgaccgtcccgtatcacgggtactccggccatgacggcggcgtttatcctatccgagctacagtcggtcggtacacccgagaaggcggttcatttgagccgctttttcaagactggtcccggtcaatatggcgagggcgatcagtttctcggagtggttgtcccgcaaacccgcagcatagcgaaggctaataaggcgactcctttcgatgagctgcagctgttgctggatagtccgtggcatgaggcacgtctatgtgccttgctgattttggtctatcgtttccaggatcggaaagcgatgccggaagagcgggaagccatcttccgattctatctgaagaatatgcggcgttgcaataactgggatttggtagacttaacctgtcgggatatcgtcggcgaatatttggtggacaaagatcgttccctcctctaccgtttggcggaaagcgagaatttatgggaacaacggatctcgatcgtctctacgtgggcatttatccgtcggaatgattttggggataccttggagttatccgaacggttgatcggtcataaacacgatttgatgcataaggcggttgggtggatgctgcgtgaggtcggcaaaaaggagaggcagacgcttaccgatttcttggaacgcaacgctactcgtcttcctcgtacggcgcttcgttatgctatcgagcattatccggaacccgagcggcaatattttctaaagaagaaataacatggatacaaagaccatctctttacttcgtgaatgggcgaaaacgtacaatacggaatcgtttatcaaggatgatccggtgcgattcccccatcggtttacggagaaacgggatattgagatatcggctttcctgacggcgtggatctcttacggtcgcagggcgcatattctccaaaaagcggaagagctacaccggctgatgggcgaaagtccttacgagtttatccgtaccggagagacttctttcgctcccctacggaaccgcccggttcgcgggcgggataccttttaccgtttttatacctatcatgatctgcatctcctttgttgtcgcctaaaggatatatacgatacctacgactgtatggaagacgctatggccgccgccggtccttgcgcagatcctatcttgcggttgcaacaactttttgctgatctcaatggcattccggtcttgcacgggacttccgcttgtaagcgtctggcgatgttcttgcgttggatggtgcgtacggatggtatcgtcgatctcggtatctggagaacggccgtgcatccccgccaattaatcatcccgttggatacgcatgtgcaccagatctccttgcgcttgggcttgacaggccaaaaaaccgctacccttcgtacggcccgtgagataacggacgcattggcgaaagtcttccccgatgatccttgtctgggggatttcgccttatttggctacgatataaatcaagaataaaaagatatggaagagaagaagataaataacatctcgtctgtttgcgtgtattgcgcgtccagcacgaagattccctcggtttattttgacgccgccaaggaattggggcgtcttttgggagagcgaaaactacgggtagtcaatggtgccgggaatatcggtttgatgtgcgctgtctccgacgctgcgttagcggctggtggaacggtaacgggcgttatcccccattttatggtggagcaggattggtatcataaaggcttgactgagttgattgaggtcgagacgatgcacgagcgtaaacagctcatggcaaatctctcggatgcggtgatcgcccttcccggtggatgcggtacattagaggaacttctggagatcatcacttggaaacaactcggtctctacctcaatccgatcgtaatcctcaatatcaatcattattatgatcccttgttggaacttttgaggaatgccatgaacgagaatttcatgcgtccccagcacgccaagatgtgggcggtagccgacacgccggaagaagctatccgtctcatccacgccgagccgaaatgggacgcaagccttcggaagatcgcggcgatttaatactattaggcgaaaggagacgcagcacgctacgtctctacaattaaaaatgaatatgataatgaaaaaactaggtttattaatgatgttgttgatcctgtcaaggatcgctttattctgccagtcacagacggcaggcatcgaggagaaagaagtgcttaagaatgaagatgtggtattccgtcagatcgatgagcatacatggttgggtacaggaaatttaatggcgaacgagagcctgtatctggtcgagggcgatacgaaagcgatcctgattgatgcggggacgaagatcaaggacttggataagctagtggcttccatcacggataagccggttacgctggtcgccacgcatgtgcatccggaccatacaggctcggctatcgattatttccccgagatctatatcaatccggcggatacggtaggtataccggaatttatgccgaattataaaggcaaagtttgtttccttgaagatggtgaaatcctagatttaggtgggcgtatcctagagatagtctttactcccgggcatactcccggctcaaccacttttgtggataaggatgccgcttatggttttagcggcgattcgttcggctccggtaatctattgctgggagttgacttctctacgctcatatctacttgtaagaagatgagtgcggtgatcgagaaatatgatatcaaatacctctaccccggacattatttcggaatgaacaaggaaacccctcaacgggtaaaggatctaatcacgatgagcgaggagatcttatccggtaaagcgcaaagcgagcctaaccccagcggcctgatggggttagaccgaatatacacgaagtatggtgtccgtataaattataaagaagaaagtatgaaatgaggggacctttagattctgaacttgatttcactgataatcttcaattcaagcaatttctccaatattaatctatccatatgagagtgagcggtttttccgtgtgctaacttatatacacggaagccgctgacattgaattctttccctaattgatcatacaagcttttcttgtttgtcttaaaccagtaattaaataagttcttcataatccgacttttgtaattatctttcattgtacgttgttaaagagcgtatttttacctaccagaattgtaagcgatgaaaacgaatagctaaaacgatcgtttatattagccaaaaagtttgtttgatgaagtattggtaaaagatgaatctcttattttgtgaaagtgctgaataacttttagttgaatcgcatttttggtctcaaaagaatttcatatatttgcggcatgaaagggtaaaaaaacgactagttgaaacgatggtttaagctagtcgttttaaagaagcacttaggaatgaagatgtgcttttccatcagattgatgagcgtacatgatttggaacaggaaatttaatagcaaacgagagcccgtatctagccgagggagaaacgaaaacgatcttgattgatgcaggataaagaaaaatgtaaacttaatgtaaataaagtattggtttctgggagaaatgaaacagaggcgagtccattatgtttcttttaaattcttgaatattttccatagtagaatcttctagtaatattaatataacattgttttctatattaatttcaaaattacttgtttttagattttcctttaataagtacttattgcgattaaagactgtatttaattggtttagtgtatctccgagcatttttagagaatacgaacatttctttattttgaaatctttattacctattctgtttataatatcactttttgtatatatgttgtctagtgaatctactatattcacgaataataggttattcttatttatatagcttcctccataatatagaggaaaatcaaaatttccagttttcctgtaaaaactatgatcaagacggattttcctttcttctaatatcttgaatatagagtcttttctgaatatagaatctttttctatgagaaattgtaagttcttattttcaatagttgtttctttatttgtgtctattatatatgctaaattcttcttgtcttgattatttgtttgttgaatatcattttcttgttgttgatgattacctgaacaacttatcaatagtaaaatgaatatttcgaaatatattttcatatacaaaattatattacacaaaggtatgtaattaatggcaattatgtacctttgtgtaattgaaaataagtttaataccttgttacgccaagtttgctattgactgttgatgcaggccaatagtaacctatatatttataggtaaaggtggaatagccccctccttcatgcatccccactgttttatatgaggtagaatatacaactccaccactgtcaccctcttggcattcataatcagtttgtgtaagccctttatagagaggagtgtaaagacctgtttctttatccttaaatgatacactaacattagtcgcttgtactactccccacgctctgcgatttgttgttctgccatccatcaagacatcagcaccgacacttaaagtctgtatagaagttgataattgggcgccaaatgcagcttggttgcttaatgtgaatccattgtttgttacttggcaaaaagcaccgtctagatcaccattattgatcagttttacgcagtttccaatttgaattttttcagctaaaccgtaataaaccggcgctgtttgtgttttcatcacgtgtgcacaagtaacaaatccttgtgcacctgttgatcttgacttaactctatatccaaaactaccccctttgttattgttaacggtgctggttgtatataaaggtccaccaggatgtatatctgatgctagatgtgtactacattcaaaatcagtattgcgaaagattatagcaggtgtatccataatcttatttttaaattgatttattttatcagaattgagatctttaatgtcaacaaatacttgatttttattatctaatagaccaaatgcacttattgataactcttgtagcatttttttcccttctatggtgtcaaaaaaaatattaaggttgttgatcgttgttaatagatagttatatgaatataagcatggttctaattcgaaattatcactaattacccttgttttaattctgttcctgaattctatagtatctccaactgttaagacaactaaccgtccttcttcattgatataattgcctccataataattaggataaactgtattactagatttcgtaatactagattcgaatgagctgttaagattatcagctaagctcatggcttccatttttgatttttgtaaatcatagacattgtctgctttatttttagtattgttctgtatgtcatttaacatgtcatcagatgaacagcctgttactaaagccataacaagtagtgtgaaaattaatctcttcatttccgtttgatttaatttgtgaaatttgtatttgttttacctacacaaaggtattacttcgtttataatatgatgatgaataaattttaattagttttgttattctatgaatatattatgatctatagttaatagaggtagactttctgcttattgtaatttttgtgctaataacttatgtgtttctttaatgttttcaaggatactaaatgtcttatccaactcctcctttgtatgcatagctgttaagctaaagcgaagacgggataatttttccggtacagctggataactgattgggtttacatatattccttgctcaaatagtatgcgagctgcttctttcacattgtgttcattacgtaccattacggggaatatagctgattcggtattaccataatcaagacctagggtttcaagtccggttttaaaatattcgatattttcggctaatgtatttctccattggggttcttggtcaatcagttggatggcttttattgcggatgcggcggtttgaggtgtagcggcggcggaaaatatattttgtcttgaataatatctgagtaaagttatgatctcttttcttgctatggcataacctcccacgcatccgaaagctttactgaatgttccggttatcatgtctactttgtcgagaagaccataatcttcaataattcctcggcctgttttgcctaatacaccaataccatgagcgtcatcaacaatgagaaatgcgtcatgctctttacatacggcataaatttgatcaagaaaggcgatatccccatcttgggagtaaacgccatcaataattacaaagcgatttttgaagttctttgagttgtttaagacatgtactaaagaatcaatgttgttgtgaaggaatctctttgtattggtacataaacaaccgtcaaatacactcgcatgagtaaacatatccatgattgcgatatcttctttacccatcatggccagtaatgtactgcaatttgcggcgtatccggatgtataggttatcgcatactcatttttcaagaaatgagcgatctcttgttctaactgctcatgcaagaaattgtgtcctccgatcaaaggactggccccagctccagctccatattgttcaagtgcgtcaatacctgcttttattacttccgggtgatgcgatagacctagatagtcattagatacgaaactgatcatttctttttctttatttgaatatggatcgaccactttcatatgggcactagaaccggtcaaagagatgacacgataaggtaagtgctggattttatgtctatatgatatataatcatcaacctgttttgctctggttaataagtcttgacctctattttcgaagtcttttaatgtcatgttgtcaaattcgttttgcatataaacccctctcttttaatttgacaaaattattgacagttattatattatgaaatgaaactattttaattatttacttaggtttcttactttataaagaagattaaacataacagattctccattatcattctctaacgcaaaagtggaacgaaaaataagttgccttattaatgaacttttctccttatttgacttaatctttggggggtgactcctatgtaagatgccaaatattttaatggtatattattaattagttctttttctttggttataagatcctcataaatagcttcggcggaggaaccaagtagcaaggtctctcttgttattttccggcataaagcatcttcgagaacaattcttgcaatcttatttatgtttagggaggtttgatataaatcagctaagtctagcttcgataatttccagattacacagtctgtcaatgcttgtatatgtatgagtgatggctgattttctttaagggaaaagtacgagttggcgaattcgcccgggaaagaaaaccaaaaggtgatttctttgtccggatcaccatattcttgtgcagtccaataacgtaggataccactttctatgaaataaagatatttttcgtaatcaccgattcttatggtaaactcgtttttcttgatttcttcacgttcgaagtgttcacaaaaaaattgttgttcttcgggtgttaatcgtagtcctttatttaaggagtctataacgttaacggattgctctattaataatgcgatgttggttttcatgtgtttagtatgtttagatggttatgttaatgcgctctaagaacaaagataatattaaaagttggataatcaagatttattcaaggtaactgcaccaaaatatctatgaaatagagattgggaagaaatactgtttagatttgatgataaggtaggcttattgtatatttccatatacgctcttgtttcctgtcgtgtgattcagtaaaaacatgtacgtgtttcccgaaaaacatgtacgactttttccaaaaacacgtacgtgtttcgcggaaattataatcgtctttttaagatgtttatgttcaatgatttatataagaacattatttacgtgcttattgtctaggatttgccttgggatacgtatgctctaaatagactccggatactgaaaatcgggtgggaaaagtaaacagggatcgttggcaaacttaccagcgatcccactaaatccctattataatttcgcttgattcacttgcggcgtgcggatacccggtttcaattctccgttgatgatagttaaccggccatcttggataaccgctcccgctccggcacgggccaactgctcatattcgcccagatcgctccatgctttcgtggataggtcgtattgaagtaaggtggtattgaatcggtaccattctaccggatggtgcatataggccttggcttcggcttgcaggcgggtaatggccgctgaatctcgcgccgcctccgctttcgctaaatggatcggtcgggcgatggcggctaagaaacaatcgtagttcacacctcccataaataagattttatccgtttggaaagtcacggcacagcctcctgttagggtacggttcgttccgtccttaaacgggggaagaacggtctcttgttgccaggtaaaagttgccgggtcgaataccaatacatccgtcgggacgatcggttcctcttcgtttaggatgggctggaagcctccggctagataaatacgtgtgccgttgggactttctccggccgctaataccggttgtacacgggctgctcccgggaagtccggtagttgttcccatcccttttcgatattcgcgaggttgaggcgtaagaaggtatggcagggctgtccgttctcatttccccctgctacgtaaatctcctgtccggtaaaagcggccgagagattatccattggagacggtaaggggggtaaggcgcaaaccgctacctctcctttcgtggggttataggagatgcgggagacctcgaccaaggaagaatcactgttgtttcctccgatgcaaacgataccttccggggtggaaaccgtagcgccgtaggcgacgggacgaggcagtcggtcgatctctttccagccttcgggaagaaggacgaatatctcgctataatatcgcttggctcctccctcggtgacgggtttgtccggaaagttgcaacctccggcaacgatcaatacgccgttatggatgccggcgaatggggcggaaacgccaagggaggccgtatcggctgctcccggtagatccggtaattttgtccagtttatcatggtgttctgttttttagatacaggctggccgcatcccgctacgcagagtagcaggaggaacagccagccggtgatttgttgtttattatgcatagcttattcttttatagcccggaacgtagaggccggcatgcccgcctcgtttacaagattcgctctcgtgaagggttgccagccgtagcgtaccagcttcgggtgagtcacttgatcgttccacacctttactttcccgttctctaccacggcttgcgccggatagtaaagtccttcccgctcggcgatctcgaatgtacggatggggtccccatcggaagttgtcaagccctttgcgtaatcgaaagtgatataggcggcgttatcggtaaacgttgcgctgcggaacaaagggccggatgggattacgttatgtccgtaggtcttgttcaaggcccaatgtgccagtcgttcgccaatctctttttttcgggtagggtgaacgtttaaagaatccccacgatcgctactaacggccatacccgtattcgatacggtttgcgccaggcggcgttggctgtccctgaaccaagtccaactcgggcggtctatgctggatagttggacatagtagaaaggcaggtctgcgttccaattctggcgccagctgttcaccaatagcgggaataatcgttcgtgtacttccatattatgggcgttcgattctccttggtaccaaataatccctttgatgggatatcggtgaaggggttggatacccgcctcgaacagataacaaggctcatacggatggcgttggagcgggttggacgcttgcttgatgtttaaggccgcccgttcacgtacccaatcttggataaagtcgttcttcgtccaatcctgtaagatatccggaaactcgaattccagtgttttccggtcgatccatgcctccgtaggcgagccgccaacagcgttcaatatcaatcctacgggtacttgtaagctatcggccagcatacgcccgaaggcaaatcctatggccgagaagcgtgcggtattctgcgtgtcgcatacttcccattgggcgtcgtggtaatattgcaggcggttcaatgaatccagtacggaagcgtcccattccacggcgtaggtctcccagcggggctttaggtcgaataaacggatttgcgagtgttgtttcgcgtaatccaattgttgctgttgttcttcctttacgctctcgtttacccggaacgccatgttggattgtccggagcatagccagacttccccggctactacatcccgatagttcagcgtgcggctgggggtagaaaccgttaaggtataggatttcccgcttacccgcaagggatcgagcgtgacagtccatttcccgttcgtaccggctacggtctccttcctttgtccggcgagggtaacagttactttctccccttggttggcgatgccagatataggaagcggttgatcccgttgcaagaccatccggtccgaatagatggcaggaagctgtaatcctccgtaatcgccggttagcgccccataaacggtgcgggccaagataccggcaccttcagcgttgggatgcaatgcgtcgggcaatagatccggacggtcgtataatccttcctgcaaatcgaccaaggtcgcgccggctatccgggcgatttcttcgataagcgcttgctccatccagtaccagtctcttgtaccggatttaaaacgaggatggcggtgagatatcggagtcatacgacaaacccataccttgcatctcggattggctttccggaaggattcgatcaaggaaagatagtcccggacgaaatcatcccggtaattcggccatgcccgagggtccgtatcgttcaatcccagatggatgatcacgtaatccccggcaaacctcagtgccttttgatacgcctcttgttgggtataaggacgatatcccttgtttaataaagtagccccgctatgcccgaagttctccacttcgtaggcatctccaagcatctgttgcaattgggccgggtagcagtttgtttccctgttcttgattccgtagccgtaggtcacgctattacctacgcaagccaccttgatcttttgcgcttggctcataaatgcgaaagcgaggaagatggataagattcctattatttttctcatttcattcaaccgaattagacgttatttaagttgtttatctggagagtaaaccagtccttccaccgctttctctccatccggggtgacgcaaacgaacgtaaacatccatttcaccagacggacctcgggggtattgaacgtaccgaccggaagcttcatgaacaccttgttccagcctttttccagatggaccggggttggtttacggcttacgcagttctcgttccccagtgggatctcattggacttctcccggtgggtagcggtccatacggggggcgttatctcttgatcatttacccagatacggctttctttataatcccattttccttgcattggaggtagatccatttcagaacggctataattttgaaattcgatccacgtacctacctcttgcgccttgggcgaatagatccaagtccatgcgtaagcggtatggttcggttgcgggtctttataggcaccgggaaccagcggtccccagacatggcgcaggtagataccggcaccgatggcgtcgtgcgtaccgtaatttttcccttcataggtatattgcgcttgaagcgacttttccggagggaaagaacgggtcagttccccatcattcgggaaagggtcggtgatacgccatctcacgttggtttgcttgacgtaggcgaacgggtatccttggaaatgatgttctttatgccataacatccgccgctcaaaatcgacaaatgccttatgttcctcgttatcgggatcgataggcagcatcgttccgttcttatcgaaatattgatagccgccgcccaaccaagaacgttcggcgatcgctaatagattcggatacaaattattctcccggatcaatttgtcctccggctgtacgacccggtcgtgccatacggcaaggatcgtacccgccaaatcatggcttccttgcggttcattgtaaatacggcttttgtataagccgatcaagtcggcgaacgtatcaaaatggttgatataatggaaacgggagtcgatcgcaggaatgcccggtcgcgcttttccccggtaactccacatttgctccatgtcgatctcacccggtttgtacttccatcccgggttccaagagatcacttgtttccctttcgcacggatataagcgaccatctcgggtacgaacttcggattggtaaactttacctcgtccgtaccgatatgtaagtaaggaacctcctcgaatacctcgcaaacctcatccatcaatagttttaagatcgccataccctccttgctctgcatatcatgacggaaggcccgtatgaaagcggcgctatgtcccggcatatctacctccgggatgagtagtacgttatgttctttacaaaagcgaaccagctcctttgcctcctcgatcgtgtaatattttccgggcatacggctcatattgcagctgtcgttcagcatcggaaagatcttgctctccagacgccaagcttggttctccgtgagatgccaatgaaatacgttcatcttgtagcgggaaagtacctcgatctcccgtttcagttcttccatggagatatagctccgccctacgtcttgcatgaatcctcgtatgcggaaagcaggccagtcggtgatctcgcaaccttggatggaatatcgcttcccttgccgctcggtcagttggcgcaaggtttgtatcgcccaataagctccttgctcggataccgcccggatggttatcccccgggaagagacgcttagttgataagcctcctcggagttgagggggattccgtccaatttgtcaaccaaggaaacctctatcttgtatcggctgtccggttggacgcttaccggcagctcctccaagaattccattaggatggaacggagtttcccttcggaagaaactgcgatttccttcggatggaacgaagcgtttgtccggacgtatttttggggcaagggcaataaaacaggattccgggccatcagaggcccggaatacaagaaacttaaaacaattgcaaaatgcagtatatatcgcatatacttagattattgatgaatgatatcctgtaatttgatagcttggaaggtcatatgtgctacgcttgactcgtagaagattcctaccgtttccttatcgatcatcgaaagacaggaatatccccacccctcggcctcgtctaataagacttgatgctccgtgggccaagtaagtccaccgtccagactcgccttgatcgtgatatgattacgccctttcgtcgtgttcggattggagaagagtagaaggtccttgccggtgatgttatccttggcgtttaccttgatcaagctggccatacaaacggattcctgtaaggcgctacggctggaaggatgctctgtccatgtcttgcctaaatcctttgtggtggccacggcacggctaccgccccggttatcacgcatatttaacatcaatacgcccggctctacctcggcaacttgcgcctctgtggtattcgtgcgggctaagttatgcaggtgccatgttttcccgcggtctttgctatacataatgccggcgttgggcacacgggtagcgtcgataaactggatcgggaagaccaaggtaccgtcttgcatcgtgatgcctcgtcccgggccttgcaataggaaataccaagacgggtcttttacttgggaggtgatattgatcggttcgctccacgtcttaccatcgtcctcacttttcacgagcataagttgggcggtctcgtccggtgtcattcccggcatggagttccaccaagcccgttcgttacccataccatgcgtccacgcggctactacccagatcgtattggtcttttcgtctaccaagatcgatgggtctcccacgccgttttgtccgtggggcaggccatccgtttgtttgaaagtcatggctactcgcatcggttcccaagtttgtcccttatcggtactgcggcttactccgatatcgattttctcttgcaggtccacgctgctattatagcgaatatcgtagactccaagtaatgttccgttattcgtcgtcactaatcccgggatgcggaaggccgccgatccgtcatccccggcttggcgtacgccgatacctacatggcgttcgtccacctttcctttccaagtgatgtcgatcggtttgttgttgatctgtgcgttaggcatcgtggtcgctacttttgccaataaggaagtctctggcttcatctggatacttacccagaaatagttgatgcctttaagcatcggttgcttagaggttagttttaccgtgcgcgacaagggggcgctaacctcatcttgccgtacggaataagattcaagagccttacgggtatttcccggtatatggctggatatgtacgtaacgggactgaaatgttcccctttgcgggatggagcttccactccgctataaaatagacgtatcgcttggatgtccgacaggtcgacattgtctccgatctgtatcgtgatctcgtttaatacatcccctttttgggccggtatccgcatctcgtaaagtacattgtcgatccggtctatcaagatggggatttgttgctctcgcacataaagactgtctgccgcaaaagccgtttgtacgatgaaaagaaggcagaaatacaggaaagtttttttcatgatgttttttgtttgtaggttgaaattaatagatatgtgaattccaaaggtagcgatattcattcatatgaacaaagcccctttggaattcgtgccaaaaacctagttatatccaatcgccttaaacctatgtacgattagtatccgggagtctgtttcaatgcggggttgtttgtcaatgccccttcattgatcggccataataaacgtgattcttgtgctgtggtatattttaatacataatccttaccgaagcgtctcaagtcgtaccaacgtttaccctcaaagaagaactcgcgaagtctctctttaaggatagcttccatcacattctcgtcgcccgcctcaaacgggttatcgttatagaaacttcctttgtcattcggataagccacctcgttcttatgtgcgttaaaatattcggaaccgtaagcacgctcgcgaacggcgttgatctctgtagaaggatcttctccgagcaaggccttagcctcggctaataatagcaaggcatccgcatagcgatagataggataatcatcgtaccaacttctctcgttactaccttccaaggtggttccttggaacttgtattggattggtgcgatatactccaaggtgccgtcttcgtgctttttataaacggccttcaaggtacctttcaagcgggtatcacctttgcggaatgattttaggtaatgatctttctttacttggtagcgcattaagccttgtaggttgtatcccggtatttcaaggaatggagttcctgtctcgtcacagtagcctgccatgtactcacgttgaggtaccatattgttacgccagttatagtctctccacatcatgaaatcatcctccttaccactatggagtgcgaagatcatctcgctgttctccttattgttgaaagagaaaacgtccgtgaatttctcttgcagctttaagttgccgttttgttgaagatcttgcaaggctgtcttggctacggtataatcgcccgtgccgccacccatctggcgtccgctccatagataaacctcacctttcagcatcaaggtagcgggtttagaccaataacactttccttgtttataagaataatctccgccaaaagctttttccgaggcatcgatatccttcttgatcagatccatcacctcactcgctggagaagcggccttatcaaggtgagagatgtccaattcgctacctaaggttggctccgtagtaatgataacgtctccccaagagcgtaacaaatggaaatagatataggcgcgtaaaccgtaagcctgccctaagtaatagttcttttcggcctcgcctaataaatcggtctcgttcgttctacggatcatcaagttgatttggttcagtgtcgtataaaaattagcgaagttgctgattcctgtaaactctgcgttgatcgtattgtatgagaaacgctctacgccttgggtagcctcgcctccgaacggctgatctccgtagatgtccgagcgaggttcgcccaatacgaatatgttataactggattgtgaacggagcaatccgtgtaaacctatgttgaatgccttaaactggtccggggatttccaatagtttgcgtcggaaatactacttacgggttccatgtccaaggagtcgcatccgctgaaattcagtaatgagactgctgccatcatggctataattatctttttcataaatgtctgtcttttttaatgggtttgactaaaatgttacggataaaccaagaagaaccgttttaggagttgggtatctaccgttatcaagaccttgaccataggtagtatctaccgccggttccggagatacaccggtatatcctgtgatgtagaacaagttttgtccggttacataaacagaggcattgctcatcaaggctttgttaatccatttcttcggtaggttccaagtcaatgtgatttcacgtaaagctagataatcacccttttcgtagaagcgggagctgttgttgtcaactgctgtcaaaccattgttggagcgagtaatattcttcttgctcaactgatcggcatagtagaacttaggtatatccgtattctggtttgtctccgaccaactgtctttcaccatatcgatgatgttaaacgaaccttgatattgtccaagtgaacgtgcggctaagtcgttatacagcgtatgccctaacgcataatcaaaacgagcgtataaagagaaatctttatagcctaatgtcgtggagaaaccaccggttactgtcgggaaaagattacctactttcacgcggtctagattgttgattacgccatcattgttcaagtcggcccaacaaacgtcacccggctcgatcggttgcttacctgccttatcctttaaagcttcccatgcggcggggccatacaattctccaattgcgtcgtagcggttattggcattcgctttcacgtcatcccaatccttgaagatatgatcttgcttgaaggcaaataaatcacccagcttaccaccttcttgttttccgccaacccatacgacttcacccttttgcgggtcgtatacttggtaacctccttggcggttattttcgttcccattggccggaagcttgacaatcttgttcgctaccgtagataagtttgctgatacatcccaactgaatccgtttacgttgtttaggatattcgcttttacttccatctcgaaaccttggttacgtaaagttcccaagttggttttgatgctgttgaaaccagtgtaattgggtaaatccaaatctgtcaacaaatcggaagtcgtacgattataatagtctaggataaagctcaggcgattgttgaagaatcctatatccaaacctacttcgaaagatttactttgctcccaacgtaatccaccgtttaccaatttgtcattatagaaacctacagagccatcatagtttgttatgatcgatccgttcgcgtctttctgcccatagctgccatatacgtcgtagtatcctaatccgtttacgttaccgttcacgccgtagctgatacgaggcttcaggttagagatcacatctaccaacttcgattccttaaagaactcctcttccatgatattccaaccagcggagatacccgggaagaagccccaacggttatcgctcaacttggagattccgtcataacgagctacgaccgataataggtatttgtaattgtagttatagtttacacgggcaaagccagaaaggatacgatagccttccttgtagctataggtataggtacgattactaccagcgttcaaagtagggatgtcatccgacggagaattttcggtccttgcgttcagcgtatattgatgccaattgaaatactcgccaccaagcattgcctccagattgtgtttttctttgaatgtgtctgtgtacgtcaaagtaacactatgttgctgttggttctgctttatatatttggcctcagccttacgggtaagattcgggctagtggcgttttgttgttggtaagatttctcgaacttatctgtttgatcgtctacgtggtatagggcgctattctctttcaagattaatttcttcgggatgatctctagatcaaaaccgatattataggtagagcggcgggttccattcgtattcgttaatttatctttgtagtaaagagggtttccatcacccgtgccgaagcctgaagcgggagatccgtcttccatgtatgggttccatgtagggcgttggctcattgtgcgatagaagaactcatatgatccgatccaaagacccggctggcgagaccatgtataagtcgttccagcgttgactgtcaagatcggaaatatcttataggatccattgaatgtcccggagaaacgctcgtagctggttcccttaatgagaccgtcttctttgtagtaacctaagctggctgcgaatgtacctttgtcgttacctcctgtgatattgatataatgatcttgcgtgaaagaagggtcttggaaggctgcgtctttcatttgccctgagtaatccttgaataagatttgtttattcggatcggttgggtcttgcatttgttgccaaccttctgccaagaggcctttggtactgtcatccaaataacggatatcaaataggtcattcccgataccgtatcccatttggttatccatgcctgaacgtcctgttctttggtatcctaagcgattgtagtaaatataatcgtgagcgtttaagtaatcataacctgtgcgagcaaagttggcacctcccttgaacttgtaagagacggaagcggatccttctttaccacgtttcgtggtaaccaagattacgccaccattggcacgggcaccgtagatagcggttgaggctgcgtctttcaatacttggatagactcgatgtcggaggggttgatgtcggccaatgagttgcgcacgataccatctacaacgaccaatgcgccattatccttacctgttatggtagctccgccacgaagtacgatatttgggtttgctcccggctgaccggtcgtgtttacgacgcgcaaaccagatacggttccttgcaaggattgtccggcgttagacatcgctgcgttttccagtacggcgttatccaatttagagatagaggttgtcaaggtcgctctcttttgtgagccaccgtaaccggttaccactacttcgtctagctgttcggcgttttcttgtaggatcacgtctactttggctttcccagctactggaatttcttgtgtcttgtacccaatgaaagaaaatactaatgtggcgtttttgttggatacggtgagagtgtaattaccgtcgaaatcggtaatcgttccatttgtcgtgcctttttcaacgatagacgcaccggggacacccatgttataggtatccagcactgttccggagactgcctgctcttgtccgtacataaatgccggaagtaggagcgcaagcattaagagcagtagattcttcttcataatgaattacttttttgttgtttatttagtttattggatgagattaattagcattcgtcggtcatattagcgactttcggacgtaagaagatcacttggattaaaagtgcgatgagtaccaatccggctagcatggcgaagtcatggccaagattaccagcgtcggtagattttcctagtatatccgtgatggcggctccggcaaatacaccggtcatattcataattccataggctgtagcccgataacggggggagatgaattggcaaaggataggcatattattggcgtcgaatataccataaccgataccgaagcaaagaccaccgccgataatcatcgggaagttgtgcccaaatcctagtaataggagagagggtatcgttaatgccaaaccgatggcgcctgtgtatacacgtccccggacattccgctggatccatttatcggataaaatacctccggcgattacccctataaaggaagagatagcgatcgtgaatgtagataacggaccggcctcggacatatccaacgagagattttcagcgaatagggtagggagccagttctttgtcgcccaacccggtaagctcggcgtggcgaaataaagaagaatgatccaaaaagcgatgttcgtgaataacatccctaatcctttaaacgcaccggaaatcggattctctttcggataattttccagttttacggcttgttccacatgatctttcttatcgtgtaagaagatgatcaagaccacgctataagcgatgccgatgataccaaaccaatggaaagtcgtttcccacgtataagcgctggccaccgtagctccgaatccccccaaggcttggcctacgtatagacctgtcatatggatacctacggctaatgagcgtgttttctcttggtgataatctgtgataagcgataatccggcaggaatatacagggcctcactgacccccatcaaggcacgtaggtaatagatctgattgaaatccgtgcaataccccatcatcaaagtcacgaaggaccagacaaataagctacccacgattagccacttcctgtttaccctgtctgccaccataccggctacagggctcatgaatccgtagatccagaggaagaccgccatcaaacgtccgaagttcgccgcagactatggtattcaacttctattacaaattcttacaattaagatagctccttatgaaaaaattttattttattacgcttagtttttgaaaaaacttattgtacctttgccctaatcactcaataaaggtataaccatgacaactaagttcttgctctcgtccgatgacaatactcgcagtggccttctgaaaaagaagatcatacattattatatggccaatggagacgctactatagcggaggtatgtaaagaaatgaatctcagtatccccaccgtcactaagctaattagcgaattacaagaggacggttatatactcgactttggaaaacaagagactagcggagggcgtaaacctagtatttacgggctcaatcccgtatccggctattttgtgggcgtagatatactgaaagatcaactgaatctagccatattagattttaaaggagataagatccgcattgagcagaatatcccttatacactcgaaaacacaccagccgctttagaccatctttgcgaatgcatcaatgaatttataaactcgttgccgatcccaagggaaaaaatattaagcattggcattaatatatccggacgggtaaatcctttcgccggatatagctatagcattttttactttgaggagaagcccttgtctcaaatccttgaggaaaaactacatataaagatctatatagagaatgacacccgttccatggcttacggcgaatatcttcaaggagtcgtaaaaggagagaaaaatatcctattcatcaatatatcttggggattaggtatcggtatcatcatagacggcaaggtttatttcgggaaatcaggtttctccggagaatttgggcacttcagcttcttcgagaatgagattctttgccattgcggtaaaaaaggatgcctcgagactggagcttccggttctgccctataccgtaccctccttgagcggtataaagagggtagcaacaccatattggccagtaaaatcgatgccggggaatacatcgggctctctgacttgatcgacgccattcacaaagaggatatgctatccattgagatactggaggagatcggttttaatctaggtaaaggaatagccggattgatgaacattttcaatccggaactggtcgtactgggcggccccttgtcgcagacgggagaatatttaagcctacctattaaaagtgccgtcaggaagtactctttgaacttggtaacccgtgatactcagatcaaagtatccaaattaggtgaaagagcgggtatattaggagcctgcctgctatctcgatctaaaattctaggtatgatttaatatgtatttcaaaggaattaaataaaaaataaataattatttcattttctcgataaaacaccactatattattaaaatattttatttatatttgcagcataattaaaatcagaggttaaaactcataaaaataacgcagatatggataaaattaaaggattgatcgatgctccctttactccgttctacgagaacggggaagttaattacgagcccattgaagattatgcgaaacttcttgtgaaaaacgggctgaaaggcgtattcatcaatggttcttccggagaaggttatatgctgacagaggaagaacgcatgaaattggccgagaaatggatggaagcagctccggaaggctttaaggtaatcgtgcacgtaggtagcacatgcgttaagtctagccgtaatttagcggaacatgctcaaaagatcggcgcttggggtattggcgctatggctacccctttccctcgtatcggtcgaattgaggaattggtaaagtactgcgaggagatcgcttgcggcgctcctgccttaccgttttactactatcatatccctgcgtttaacaacgctttcctccctatgctggatttcttaaaagcagtagacgggcgtatccctaatttcgccggtatcaaatatacatacgagagcttatacgaatacaatcaatgtcgtttatacaaggatggtaaattcgacatgttgcacggacaggatgaaacgattcttccttgccttgcgatgggtggagcgcaaggaggtatcggtggtaccacaaactataacggaaaagaattaaccggtatcctagaggcttgggcagccggtgacttagagacagctcgcgagagacaaaacttctctcaggaggttattaacgttatctgcaattaccgtggtaatatcgtcggaggaaaacgcatcatgaaattgatcggattagatctcggcaagaaccgtaccccgttccggaatatgacggacgaagaagaggccgcaatgaaagcggaattagaggctatcaatttctttgaaagatgtaataaattctaaggtatggcagcgtttgacaatttatctaatccatcggaatatctagcttattggggcaagacctatcggaatgagcttctttccaatattcttcctttttggatgaaatacggactggacaaagagaacggcggttactttacttgcgtagaccgggatggtactctgatggactccactaaatccgtttggttccaaggacgattcgcctttatcttggcatatgcctataatcacattgagaagaacgaagaatggctgagagcctgtaaaaacggtatcgatttcatcgagaaacattgttttgatacggacggacgtatgttcttcgaggtgacagcgacaggcatccctgtacgtaaacgccgttacgtattctccgagactttcgcggcgatcgctatggctcactatgcattggcatcaggcgacaaaggctatgctgagaaggccgtgaacttattcaagcaagtattacactataagaataccccgggattattggagcctaaatttcgtgaaggtctcgtggcgaaaggccattctttctgcatgatactgatcgatacggcggcacgcatccgtgaggccataaacgatcccatacttacacaacaaatcgatgattccatagccgagctacgccgtgatttcatgcatcccgaattcaaggctatcttggagacagtaggacccaacggtgagtttatcgactctatcgccgggcgtaccatcaatcccggccactccatcgagaccgcatggtttatcttagaagaggccaaataccgaggatgggaccctcaactgaaagagatgggcttacaaatcctcaactggtcttgggactggggctgggataagacgtacggcggaatcaactatttcaaggattgcaaaaacttccctccccaagagtattggcacgacatgaagttctggtggccacaatgcgaggcggttatcgctacgctttacgcctaccaagcgactggcgacgccaaatatctcgaaatgcacaaactaataaacgattacacatttaatcatctccccgacaaagaatatggggaatggtatggctacctacacttcgatggtagtctctctcaatctgccaaaggcaatctattcaaaggtccgttccacattcctagaatgcttctcaaatgtagtttactctgcgacgaaattctttctaaataactttatctaaaatactgaaaattggtcaattgacatcaggggtcacaaccgtggctcctgatgtttctaaggctttgttttcctttttattttcctcaatcaaatgaaaaataagaaattatatccttggatcgtagtcggtttactatgggttgtcgccttactgaactatatggatcgccagatgctatcaaccatgaaatcagctatgatggtggatatcgtggaactagagtctgcggcggactctgtcactcgtgacatctgtgataaacgcataggaaagaaaggataatattacactaaaatccttctttcacgatccgtttgatcgggaggaagaatcgttcgatcaggcgtaattcttccgttacgatctccgcagaggcttgcgtctcgggcgagacgggcaggtcgataccgtaattggttctcaggccctctggaaaatcgatatccgccgtatagtactcgtcggtggggaccaatgagatattcgataccacgccgtttaccactccaaactcctgatccgggaaattggagaaacggacgatcgcccgctggcctctccggacttttcccgagcgtgctatcggtatgcgcactttccccaccagccggccctcgccttgcggtacgacggtgaaagccacctctccggatgggatatactggttctcattccagtacttggtgaaagtcacgacaccccctaccggggcgatgaggcaataacgcaacctccactcgttcatgctgttcagcaattgttcccgggcggtctgtaattcctgccgtagcgtaaattctttctcgctccgctccagcgtcagatccagcaaggattgctcttgctccccgatctgtatcctgagattctcagccgaggctgccgccccttctagcgaataacggctttgcagtagggaagcccgtgcggtctcatgctcgtaggaggaaatcacggaccggctatacaataatgaatcccgggcgtattgccgccttgtcaaggcgaattgctccgagagggtcttccgctgccgttcggtctcgttatagtaagccttatacaacgctatctgtttgcggatggaggtcattttttgcggataataatcgatctccctgtaattgatacaggcatggagcgccgacagtagtcccgagtaagccgcttgcatatcacccagcgatagctccttgtactttgataatgccttgtccaagctatccacgtcgcttccggatcgttccaacgccttatccagatagatggcatcgtccgtgtcggcgtgattctctatgaccgccagccaatccccctgccttaccggacgattatccctgacgagcagctcctgtatctttcccgccgcccgtgtcaccaccgccgttgcgggatgttgccccgtcaatgtcatgtcagccgtgatcacgtcaggatacttgaagaaacagctccccaccagcaacgctacgaccacgaggaataacagcgttatcccccaccgtacgatccaggccggcacttgccccatcacctcctgtacctcctcgctacgtaactctatatctttattatttttcataaggtggtttatttcgtttggtggtaactacgataatccctcttttcccttttggaccgtatatagcagcatcaacaccttttaggataaaaatttcttctatttcggtcacaggaaacgaaagtatatcataattttgatatggaacgtcatcaacgacaaataaaggtggctcataattttttacaggatccgtttggaatgaaatggctccataatcttgaataaacacacattccttatacacatgatctactacataccacgaaatgttaacactccccaatagataaagtaaggacctcatatcctgtatatgccattgttctatgttttgtcgatagattacacgactggatggcaaagatccagaatacaatccattatatttttgttttcttctcatgcttgcgataatagaaacttcatcgagatttacggttttccatatatccggatttggttgtgataagtttttaatgggagtaacctctaatgtcatagctattaaatcccaggccaaactcaatcgtgagggatctgaatctatttggttcttaagtggaagcaatcccattcggaagtctggaggcaatgactggaaatcagtctgttcttgtatgtttagtacgacacggccacacaatagattcttcatagaatctactaaagcgaacgaggatatcccttttggaaaatgttttttgtcaaaaactaaataagaatctttaggattccagactttttggaaaaaaatagaatcttccgattgggccactaaatataataatttcattggcacttccctcgaagagttgataacggataagagccattgttctttattttcaattattttaagaccaaagccattttcactcatcattggcaaataaaaattcttacggattctatctcgattttcgcattttaagatatatctttctcctggatttgcataaatatgaaagtagcctattccgggcaatagcgttttcacggattgaaccgtatcccctctctcatttataattactccagtgatggatatctttttcttgtcaattccttccgctgtaaaaactattttacatgagatattttgaagaatagatccactttcaggataaaacgtaacaatatagtcggtctcccgttccgatgcagaaacgggagataccaaaaaaagaatttggataatactaatgataatagatttcataaatttatatattcattagtaccggcaaatcaggtaagcgacgttcagggcacacttctatgttgggagaacaagttccatagtttctagggcaattagtaccatctcgaaaatttccacatggatcagaaatgccaaaagccgcattacatgagtatcctgttgctccacaatttgtattacgctcgttacaaggccgtcctcctataagtttagccattgtaaattcatttagacggcttttttcaatcactttaaaatttttcataacgcaatgatattaagtttttaaataaatagcctttttattataatcttattcagctattttgtgacaaatgaatttttataaattctttgagagaacccttaaggtatgtacatgtatcataatgtttatctttaaatatattttctatccgtttatgggggcaacctccaaaacaaataggaagataaggacatttagaacatgttttatcttccagtggatctgcggcatagaggtatcggttaagaattttctgatctatggattgaatagttccttctgaatccaattttgctatggcatatttttgatcgcctataatttcccaacatttatataagtatccttctggatctattgtaaatgtgtgtttatttcgaatagaacattctgtaaaagaggaatctggatatccacataaattggttacgatacctctgtcatagtagagctgttgtataaactcagatttctcttgtctattgaaaagtaaagaacaagaagaacttgatttagaagaagtagatgttataaaagcaggataaattccaatcaatgggttgctcttatatcgttgtaatatgaaagaatataaagttataaattcagaagaattctctttattcatatttactcgtatactaattcgtatttctggggcagaagatgctagcaagtctatattctttatagttctagaaaaagtatcgttttcattttttgtgaattttatcttgttgtgagtctcttttaatccatctagcgtaatttgtatgtgttgtaacttcatctccttaaagagttttataatatccggtgatatcaagaacccattagagattattgagaaagaataatttttatcgggaatcagaatcatcttacgataaagtgattctatttgcttaatgcctagaagaggttctcctccaaaccaaactacgtgaatatttttaatgttttcatattgttctatgaatttaataattgagcttatgaccttttctgtcatataaatattacgtttgcaattttcaaaacagtaagaacacgagtaattgcaatccatggttggagctatcgttagatttaagatattgatggagcgtcctgctaggataatacttttatacagtaagaactcatcccgatcattttcagtgatcatatggttttctttcaaagtttgataaagttcatcacatcccaagtctttctcttgtaaaggtgtatgtctattcttgttgactaataaaatcttatatgtatcctctgctatttcgatcaaggcattagacaatgtattatatgcataaaatttactgtctatctcaaataggaatgtgtacattgatattttcatggtatttgcatatttagattgttaagtgattaattccccaactccaactggttcttcaccaacttataataagtcccccgcaaggccgtgagctcctgatgcgtcccttcctccacgacgcgtcccttgtccagcaccacgatcttgtccgcgtcacgtaccgtgcttagccgatgcgccacgaccaccaccgtccgtcctttgtagaaggcgtgcaactgctccatgatctcccgctcgttgttggcgtccaaagcgttcgtggcctcgtcaaggaagatgaagtcgggattcttgtacaccgcccgggcgatcaggatacgctgtctctgcccttggctcactccgtttccctccatgccgatcttcgtattatagcccaacgggagagaatcgatgaaatcccggatattcgccaccgtcacggcatgcagcaggcgttccttgtccaccacctcttcgccgggggcgatgttgttggcgatcgtatccgagaagataaaaccatcctgcataaccgaaccggtcttgctacgccatacgtgaggattcaagttcttgagggaggtatcgccgatcctcacatcccccttgttggggttgtaaaaaccgagcaggagtttcacgatcgtcgtttttccgctcccgctggcccccacgatggcggtcaccctgttatggggtatcgtcaggttgatatcctccagcacgtaatcccggtccgcgccgtcatagctgaagctgaggttttccagccgtagcgtcctgtcatcgggaagaacattcagccttatcccgcctgcctgttcctcgtcctccttcccgtgtatctcgccgagccgctccagactgatcttcgcgtcctgtagggatcgtgagaaatcgatcaattgctcgataggcgaagagagctgccccacgatgtaggtcaccgacatcatcatacccagcgtcatatccccttgcacgacggcccgcgccgcgatgaaggagatgagtatgttcgtggtctggttgaaaaagaccgccccgagttgctgatattgttgtaacgccaaccccttgatccctatcttgaaaagttttacctgtatccgttcccatttccatcgcatcttggtctcgcaattattgagcttgatctcctgcattccggtgatgagctggaataggttgctttgctccccggccgcttgcgagaaacgctttacgtccagctccctcctccatctcatgaaggcgagtacccacgccacgtataagccgttacccgccaagaagagtcccagtatggtccagtcatagtaggcgagcacgaacccgaacacgatgaagttgacaaaagagaagagcgtattgatggatgtcccggtcatgaaagcctcgacgcggtcatggtctccgatgcgctgcatgatatcgcccaccatcttggtatcgaagaaatgcaggggcaggcgcatcagcttggcgaggaaatcggagatcaaggcgatattgatcctcgtgtttacgtgcagcaatatccagctccgtatgaagtccacggatagcttggcgataaagatcaccaattgcgatataaggatcaaggttatgaaacctaggttgttgtcccgtataccggtatctaccaagctctgcgtgaggaaaggcaggatgagttgcagtacgctggctgtcaccatgcccagcacgagctgtgccatctcccgcctgtagggcgatatatatcggaaaaagaatccgaggttacgtttcctgtctctctcctcgtcctccatcccgtagaactccggccccggttccagcaagagcgccgtcccggtatcctgcccgtccaccttggtactgacccagcaccgcttgaactcctccctcgtataggtgataagtcccgccgccgggtccgctatgtagaacttccctttccttatcttgtagcaaaccacgaaatgccattggttccagtgcagtatgcagggtaggggacattccttttccaattcctccaccgtgatccgcacgccctgtgttcggaacccgatcgcttccgccgcctcgctgatacccagcatggagactccttcccgtgtgatgaaggctttctcccgtaagttctggatcgagtacacacgaccatagaacttggcgatcatacggaggcagctaggaccacagtccatagaatccaattgctgataatgtggaaacgatcttagcataaattaaaacattaggatatagacatgatttagttcttatttcttatacttgatcagcattatgacgggattggaatcctcattcaatttcgtcgcgatttcgtttagcctacctttgagcttcccttctttataagcctcaatcagttcaggcgcatcaaagggataccagttcgcgatatcttgattaatagatgaaatccaatagatcggtctttgatataaaaaatcagtattatatatttgatatttgaatatagaatcttcctgtttgtcgtataccaacctactcaccggtatttttctcgttttaatatcgagttttttttctacggttctcataaaataataacggcttgtcacctcctctacaaaaagaaatatttctgtatccatggaatatatagagggtgtcctcacgataaaaggtttaatatgaccatttggcgaataggaatatagggtatcggatgagagattcataagtatccaattatcggaagtggcggttgtagcaaaaaaagtaggaattactttttgatcattatctccgaatataaccagtgttttctgttctttagaaggaattgtaattttctggataatacttccgtcatactttgagataatcaaatgataaggctgttggtctgccaccattccatagcctttgttatcataagtgatcagattatccttgtcataattaaaaaccttaaggtagtcactttcggggtctaggaaattaaagcttcttttaaagtccccgtctaaatcatatactgatattttccctgtatgtgtaacaaatagctcattgttttcctcatctagtgtaattcctgcaatccccggatattcctcgacaccttgtcctaaacggtttattttccgtatagcttttcccgttttccggtcaaaaatgaatatgttcccgtcgtttgtgttgttttttactattataaatttttcgtcgacatccatgacattaccatgtgtgataaattcgtcagtcgtttccagcgcaatatattccacatccataatatcctgaaggattagctccttttctgggtaatctttgctaacattgatcgtgacaagctcgtctgtcgattgcttatcttttccacatcccgctaaggcaaagaggaggactactgaaattaaatttactttcatgctagtatttatttttcttatgttttatcagcataatcaccggattagactcttcatccaatgtagttgcgatctctttcagtttgcctttcaatcgtcctttcccgtaagcctcggcaagttcgtgggcttgcaatgactgtccgattacgaattccggatctaaaggtctcgacgtcatatccacttctcttttgctggtataatcaccattgtatattttaggtatgaataaagaattttccagtctatcgtacatcaatccggaaattggaaaccctctccctgtttcaaaattaaattccgctttcaacaggctcatgaaataataacggtcggtaaaaacggttggtataagaaatacttcaggaggatccatggagtgtatggagggggttcttacgataagggggattgtcgtattagcatccggcaaatagtggtatatggtatcggatgatgtctccataagtacccaattggtatgatctggaactatttgatacatggcggttggtactggagcggcccagttctcccagttttccccatctcttgcgaccgggtttttaacttcatcaaaaggaattgatattttccgggtgatacttccatcctgcttggaaaagattaaataatatggaggtatggcgtttgacgggttttccagactattatctggtacataagagatcaaattatcccggtcgtaattaaatgtatttatatgagattccgtaccttcggctttgaaactccttttaaaatttccgtatagatcatatacagagattttacttccggtataggctataacaaatatttccttgtttgcctcatccagaacaacctccgtaatacctacatattcctcgccaccttgccctttcctgtttatcttcttcaaggctttgccggtttttctgtcaaaaacaaacaaattcccgtcgttggcccagttggttattaatataacttctgcaccaatggccattactttgccttgggtaacaaactcatcatttgtttccaacgggatgtattccacatccatgaaatcctgtagtgtcaattccttttcaggataattctttgtaacatcaactgtgatgagttcatttgttgattgtttatcttttccacatcccgctaacgcaaagagaaggatcgctgaaattgtgattatccatttcattattcttacgatttaaggttaaacacttagggcgatacattcgctcaatcatgcctaattacaaaaataggttattttttctcgatatctcttctttttgctcaaaacttatagcggtgaatggaattctatccgttatttacataatttaggcaaaggcttagcaatggatgttgtttcctctcgctatcttgctatcttgtgggtcacttatcaaaaggtcgaatagttcgtttatttccgggtcgttgattcccagatcatccttttcggactccagatgccagctgacccatgtttgtccttccaacttatccagtcttcgctatctaaaaaagcgatatactcaccttgggcaatctccaaacctgggttacgggcagcggacgctccctcgttctcttgatgaatcaccttgatacgatcctctttcttagcgtattcgtcagcgatctttctggataagtcggtcgagccatcatccaccaagacaatctccaagtgcagatcgccttggtacatcaaggaatctatgcatgtggtcaaatattttttgcttcttggaaggcccttgtataatcaccgttaccggctatcagcaaacgactattaggatgagcttctaagaccatatggaacgctttgatcaaagaactcacaccctttatttcgtcaatccgatcggcaaaaaaaataattgtttctcaatttttgtattataagagacagcctccattggattcataaccattagggattggtttgttttttgtgttttattaacatgattaccggattggattcttcatctaaacttgcggcaatttcttttaatcgtcccttcaacttccctttttcataatcctcaatgagctgggaagcctcgatactttgccaagatgcgattttatcgtctacaggaagtgatttcatattcaccgctcttttctcagaataatcgttgttatatacaatatattcaaaaatagccttttcttgtttgtcatataataagtctgtagtgggaaatccctcatgtgtctcgaagttatattcttttttaaccgtttccataaaataatagcggttagtaagaatccctaggaagaggaatacttccggattcatggattgtacggatggggtccttgctataatcggtatcattttatggtctgattggtacttatatactgtatcggatgattgttctacaagtacccaacaatcaaaatagggaattataggattatagttatcagggatcacgttgtaatatatattctttgctttatcagaatagtttacagccattgatattttttctttaaatggaatctggatttgtttggttgttccatcctgtttagatataatagtaaaagcaggcttgtctgttacccaataattattagttattaaacttgtttggttgaaattgtataaatgaaagaaatagagttcatcacctcgtttaaggcttcttttaaaattcccatctaaatcatatactgatattttccttgaaaaatgatcgagtacaaatatttcattttgtttttcatcaagcacaattctttggatgaacgtatattcttctccaccttgcccttctctatttattttttttaatccttttcccgtttttctgtcatagataaagatatctccatctctgattcggtttctggcaagaataatatcctttccgattgctaggacaagaccttggcaaataaaatcgtcctttgtttccaaaggaatatattcgacatccataaaatcttgaagaattagttcttttttagggtaacttaccgtaacatcaacagtgataagctcatttgtcgattgcttatcttttccacatcccgctaacgcaaagaggaggatcgctggtattgtgattatccatttcattattcttccgatttaaggttaaacacttggagcgatacgttcgctcaatcatgcctagttacaaaactaggttattttttctcgtgatctcttctttttgctcaaaacttatagcggtgaatggaattctatccattatttacataatttcggcacagtcttagcaatggatgttgttcaccctcgctatcttgtgggtcacttatcaaaaggtcgaatagttcgcttatttccggatcgttgattcccggatcatccttttcggactccagatgccagctgacccatgtttgtccttccagcttatcctgatcattctctagctcataatgcaatgtgggaaggtggaaaacgactatagtcgcctgttggaaatatttcctgtcggtggttatcacccaatcaacgggtacatcctctattttcaactgtagatcttccccatttatcgtgttgaatacgagcatcacttttttaccagcctttatttggcaatctacgcctgctacccaatcagacacacgccaatccgtatattctttcagcccggcttctgccttgtagtaataatttctgcatctttgtatagattccggaatcatttgcccgcaatccctccaaaatcgatccagataatgtttgtgtactatgtatgaggaatcttttatgttgggaagtagtgtgaatgccttagaataaagcctgaggatgtttacataccaccagcttctcaagtcaacgctcgtcttagaggaaacaaattgatcagagaatttaatcaatccctcagtaacttgaaataatgatttcagccttcgggctaggcttgtcgtatgcatgaccgattcttcgttctggcggtaataataaaactcaatgttggtgataaccatcctctccgcttggcaaaggacgatgggacaccataactcatcctcatgcatgatgccttcctcaaaacgagcctgtattttatgcagatatttcctattgtatatgtatttgaagggcatgggcaaatagaaacaagttttgactaattctatgaaactttctttaccggaaagcaattcttttatagatccgttggaaatacatttaaaaggtttatccatacttccgtcttgatgacatagccacatatttcccatcacgacatcggcatgatgtttcaccgcctcatcatataaaagagataatgattcatctttaatccagtcatcactatctaaaaaagcgatgtactcttccgtggcaatatccaaaccaacgttgcgggctgcggatgctcccccgttctcttgatgaatcactttgatacgctcctcttttttagcgtattcatcagcaatttcccctgacaaatcagtcgagccatcattaaccaatataatctccatacgaaggccaccttggttcttcaacgagtcgatacaaaccgtcaaatatttctccacgttatatatcgggataatgatcgatatgtcgatttgattgagcgtatccatatagtatcaggttcgttgattattatttacattcttggaataaggatttataaaatgcgatcatgtttttcccgaatacttccgaggaatatttctccaaataccgtttgcgaccgttcttcccgagtcgtttcgcttctttcgggttctgtaataggtagacgatcttctgcgctaacagggaggtgtcgatctctacactatcaggagatactattaatggtactttcaatccgcaagattcgtctacgacctcgttcaacccggatgtggcggttgcgacgatgggtaattcatgcatcatcatttcgacaggtacataaccaaaaggctcgaatagggaaggtacgacaccgacatcagctaaacggtataactcaaaaagcgaggtttgatcaacgaaaccagtgaaagttattttggagaagataggattggcttcggagaaagaattttgataatcgccatcaccaactatccataaacggcaattggggctttcttgtaaaattaattgaaaggctcgaatcaagaaatgagttcccttgatctcttctaaccgtccgacaaaaataatcatttgttcttctgggtacaagtgccatttttttcgtaatctcttctggtcaacttcttcttttatcttgtcgctcattccgtttggaataattattatacgatttatatctactccataatcgtgatacaataattcttgcatatagtttgacaggctgatcacttgatccattctttcataacatgtcctttcctcctcgaatgatttttggattaaatcttccaattcatttgtttctttttttcgtaagataattcgaagtttttctaagttatcatgaataactgaactccattcagaaaaatgagtgacagtaatcactttgcaatcaaatgcaatttttagttctaatgcaagtgatttatctctgtatgaatttaaatgaaaaactagatttttttggtcttgaatataatttctgagtagatagacaatattccgagagtaaacttttcgttgttcttgatctagaagattccattcttttgagatcggctctgggaaataccagtatgaaacatctttcacttcttttttttcgatttgaagttggtcacataatatgtgaactacatggatgtggatactattacttttacttcgcaaggcggtaatcaattcacgaatataggtacctactccgtataagccacctcgacttttgttcgagaaaatatatagattaatcatttttatggtatgttgatagaatatacttacaacttatattataaaagctgttgccacgaagtctcaattgctccaagggcagtcaatctatacatgccctcacctgcataaccaccagataaccccatattctccaatgttaaactaggtttaagcttcggaaatattctgttcgactctaattctctagtgtgtgcacgcaaaaaaagatatatgtcttgttgttcatttgctgatagatcatttctattatttttgatactctctgtgataaaagataaacattcgttgctcatttggcttttggcacgatgaagccaataccatccatatccaatcaatccttcatcacgactgtaattagggaaagggtcgtgaatgacggctcggtacatccgcttatcgaaatcctcaaataaatcttcctcaatctcaataagattattgtaggataaatagttgatccctaccccaataccagctatgcctttctcataatctggacgataatttacatggagctgttcttggattgccatgatcaaatcccatgcatattcttcgaataatgtttttcctgtataacgagcataatggaagaagaaaatagctattcctaacttgccatgtagtaatcctgggcattttgttaatgtcccatttaaaagaagccaatctgcaatttttgttagttccataataattactctaggcagttacttcttttgtttatattttgcaatcataagaactggattggattcctcatctaagctggctgcaatctcttttaatttgccttttaaattcccatttttataggcatcaactagatcaggtgcttctaatgttttaacaaaggctatttctttatttataaaggctattcctccataacccaaacttacaaattctttatgcacataatcagcattataaagagagtattcatagataatattttctttcatatcatacattaaatctgttcttggaagtcctacccgacttgaaaaatcatatactttttttactgtctgcataaaatagtagcgatcagtaagaactgatggatatagaaatatctcggttcccattgattgtatggaaggagttcttgctataaaagggacaactcttttatcagtaaaaacccgatatatcgtatctgatgagtgatccattaaaatccatgaatcatgaaatggaacaaattcttcatttcgaggtcttgcagatttagtctgttccttattaataattaaactggtttttttcttgtcatatggaatatgaatttctttgataagtcttccgtcctgttttgagataatataaaatatgtttttgatttcatcggtaaataaattgtctccatcattacagattaaatagtcacttcctaaattgaaaacccgatcataggatgccccttctatatttttaaaacttcgtttaaaattaccttgtagatcatatatatatacttttttagatcgattatcaactacaaataattcttcatgttcttcatctagggtaactcgcaaaagaaagctatattcttcggaaccagaaccttgcctatttatttttctaatacctttcccttttcggtcaaaaatgaatatatcaccatctgaagataatttcagatttctgacaataatcatatccttactgatatcttgcatataccccatagtcgtaaacgtacgactggtgtctagcgggatataatctatatcaaatatatcttggagagcaaattctttttgagggtaatcttttgtgacatctattgtgagcaaatctttactttgttgcatatttacacagcctccactcaaaatagaaaggaggacagataatgctataattttatttttcattactttttatattttagaattaaagattctcacaatttggattatgaatatttacatgacaaaggttagtttgcccaatcattatttcataatcagaaggagacggacatagccattgataaatacatgcattgcaaggctcttgattgcgtactcgcagccaagattttccttcttctatttctttctgtattaactcaaaaatactatgagtacatatgttgcctaatgctggataatttatattcgaatgcacatctccatttggcattatgttgattttcccaaagtcattattatttatcatttgtttgataaaaaagtctttaatggacattgatgtagataatatatcgctcttttttagaaaaacattttctttgaaaaaatcgatattataccctgtgtatattggattaaattgatatttgtcaatttgatattcttcgataatttcccaagcttttagataatcatctaaagatgctatatcaaaaataagttcaaatagattattctgatcttttaacgattgtgtagttatgattaattgttttatatctataggaaaatgaatatgtattttgtataaaaaaatatttttgcatactgatgctggaattgcaaaattaatataattgcatattattttttttgacgaattatattgattcaaaaaatcaacaagcttgtcaaatttagcaatgtgttttaaatccccactgatgctatatgttatattatctggcattgactgcaaataatcaattagcttatcttgatctaagatatgatcaagatgaatgattatttcgtttaaaaaatgcaataagttggcattttttataaaattatacttttcgttacgtttattgcagaaattagtatgtggtaatatttgtataggtttccctttagataaagatatatctataatatctcccatgtatttttctcttaaatttgtaataaaagaatgtatatcattttgtctatattgctcatttttcaatatggtaacaccgcaattttcatcttgaagtaattcttctaatagattaattactttttcattattagagattatggtttctttgtctaatgtgttatacaataacatatagccatttgcaatgtttatatgcacataaggctcaatcataaaccaatagtcacttgttctttccattactctgttattaaatgattaattatttgaaagaattcactaggacatttttccaaatatgaaaaaatgcgatttagtttatcttcaaatgttttttgattctgaaagtctggacaaacaaattcctctacacctagttgatccagattatccaaacttaataagcaagtggagcaagctcttcctccgtagcaatattgacaaacttttttgcagtgtacataataagaattgtacctttgtacaatttcaggaatgttaataaatacatgatcatttactttgcctaaaaagtttttgtagctaactttttcacaaggtaacaagttattgtgcgtgtttaagaatattcttgtttgaaagggcaaacaagttcccgttgggaaggaatctatcaaatcatacaataagtagagtgtgtttgaaagatacaaattgagagaataatgtttcaaaaacttttttgattcattaaatgggatcaatcgattacttactatgggtaatacgtcagatccttccttttggaattccttctcgcttatttttctggaatgaaaaatatcatcaaaaatattttttttattaagatttatatgatctgagcttaattgtgatattcttggaattttaccatatctattataaataaactcgtaaattccttttatggaattgcgattatttagtactgcattaaaattcacatatttatcgaaataactaggatgttttagttttatcatatcggtattcattaaaacatcatgaaatgaatttttgttgttgcttgcataggtacgataactatgagctttttcgtttccatcaaaactgattaataactctatattattttcaactataaagtcgatatatttgtgtattaaggtggcatttgttgtcatattgaacattaagtccaattttttgtttttgtttaaaagtttcgcttcttctattatttgttgtatagcaggaaaattgacaagtggttctcccccaaaaaagctaattgttaatttggtctttttatgttttacattgaaaatgtatcttaggaaatttaaagcgtattttatatttatatttttggattctttttttgagaagttgtataaatcacctagtgaacaatatttgcattttaaattacaataatctgttatttcaaatacaataactttcgtttgagtgatattttcctttatgctattttcgctaatattagctttaaattcaaaaggttttgcttctccaaaaaaaccatgatttacaagataagagtattttttcaaataataagcatctatatttatatctgtcgacttttcatgaattttttttaattcgggatgtattaacatagatagtatgcgttgggtatcatacaaatagaagttgttattttcagtggaatgtattattgatttcattatagtagattaattaaacaaaaagttcattctatgcattacattcaaaaaatattcaaggtcggtaaagaccttgaatatgacaacttggagtctttgtaataagataatactagtcgtagatgttgatagcagtagattatgaatacttatcaacagttgcattcgatatgctggtatttggagagcagccatcaggacaatcagatccaccttttaggattctcatttcacgtttctccaactcattctcactaagcttattcagctttaattttccaaggatttgctttttgtctttttccataactattcgttattagattgttaataatttgttctttacagaagtaatattacaaatgtatagtatttaatgcgcaaaaacaatagtctatttgggctttttttgttttttttgcgcagaaattcaccttcttagtagtttctttatgatccaactgcgaattgtactttctgcgatatcgaccatggaagcaattgagcggatgcttttacctttatctaataatatttgtatttcacacatcaactttttattgatttttttgggggagctatgtattgtttcatttggaaaatcgatctttttttctttgtatgggtgtaggaggttacaatggtttgctctttcgatggcttcttgtatagaatgaacattcaatttaacgaatagggccttgatttgattttgtatcgtatgtttactacgacataaggtttctgaaatctcatttgaatttagtccttgccgggaaagatttaataaaattcgttcccgctcgtttaggagactcattgtatgtgtgctccaagaaccgactgcaggttcatatttttcataagttagcgagtttttgtaatgtaagtagaagccgtttttttatatgctacactttctacagaacagattaaatagcttattttttcattcttccaaacaggaatcattctttggtagagcacttgtgatagtggatctttagtataagagttcttacgaatcaagcggactgtacatgaaatatgatctatctcatttcgcttttcatgtaatgcttgtaggtgttgagggataatttctaaaaagttgttccataaagatagatcttcaggatggataatcagaggaaataaatcaaagttaagtttcatagcttcctttacagaataaccacatagtaataaatcatccggtttgatatagatgaaacgtttttttgatatatctagtacgtaaaaactaccagtaataaccgcagaaaacattctacaatattgaatcagaagaggttcttgttcttctgaaatttcaattatattatttatatattggtagatcgactcttcaatggggttcataacaacatctatttatcagttattttctattagtttagccagctgccgaaaaagtaatgtatggcaaatgacttctctatcttactctctacattcttggttgtttcattgtttatgattgtttttatatctgtataggttagaggtgctattagttctgctggaattaatgtcacacgcttttgataattgctgtttttgtatacttgagtggtcatgcaggggcctgttgtattaagaatcaactcgcaaagatcagagtacatgttgctatttttctcagtacaaaatacagtatcgatcagctctttgaaataaggatgctccggaactgtcgccataaaagcatttccaacaatgtaaggcacatggatacggaaagcgtgagcttccggttccaatcccatggcacattctgtattacataatataggagtgatattttccgtacattcataatccatgtctacatatagaccaccaaacttataaagtattaaataccggattgcgtcccaacgttgtacattatgtggaaaagcattataggccggaataaattccggataataggttttcaaaaatgtctctatatcatttttattccaaaaccgatactcccaatcgggatttagctctttccatgattgggaaatctcgactaaagaaggaggtggtcccgctaaatcctcatagatctgatgaatgatctgtggaattttaggatgtatatgattatttcggattgcggtgacaaagtgctcttttaagtaaaagtattctttaggcatatacagttcctcgaaagatgtattatattctttggtttgtgaatataaatcggcttctatgtccggacagatgaaagatggatgaacaatatggtcgatttcctcgtttttgatgtttgtaaaaggatgattctttatggcatggggcgttttgtcattatatgcgatctttgttattaaatttttgtttggaatgatcgataatctattattgataaggtttgtgtaagcatatttggcctcccaaaaaccttcattgtcatgattcgccatattgaagagtctgttccaacgatattggaatggagcgtgagagggtaaatttgataagtaatctaattgtttaaaaaggtcgtacttgttttcgtgaaggcagtgctcttgccaaactcttctccaaccagcccatccggatacgtgggttaggtttgaataatagaaagtaccgtctcccctgtttttcccgaattggtaattgcttccggatatgtgtccgatgcgttcatcgtgtctgaacttttccagcaatgtcgtacaaaaaccaaagaatgaaatggaaggtacacaatcatcttctagaatgactccttctggctcttgctcgaagaaccaagaaatcgaatcaaaacagtgtttgtcgtatccttgatttttttcctgatatagtttaaatacttggcattcccagtcaatgtgggaaacaatgaacgttgtttccttacttattttacgctgtgtgtcattagttgatccatctactgcgatatatagtcttctcggtttcaccactttgatgcgatcaaatacttgctttatatttgatcgattaaaagctataaggagaatcgctattttggggtcgtagattatcataatatgtattagttcttgattaatgacaaacttagtatttttgttaggttacgcttagaattcctaataacatagttcaatgcaagcattcaggaaaaacgtatcattgggggcactgtacagtgattatcacaatagtgatggatcaactatataatactgtttaatcctgaagcttgcatatgataaagaataatacctaattattttgtatgatgaattctcccataagccaacctaactgatgctctaactttacgtaaaatcgtcctgtactctcattgtttaaaatgatagttatacattctcctgtttcaccagagatgttgtcttccattattacagtaccttgttcgtcggttatagtgatggttaggttttcaagcgcattcataaaatccacactcaaaatgttcccttgtatggataatgaaggtggaagaggattaattgagcgataatatttatccccccatttccctcgtgtctcaaccggatctccatagaccaactgcacagaaagaagagctataagccctaataaaatagcaaatctttttctcatggtattaaattttcttgtaggcaaatgtaagactttaaggatgaacttgtttttataaaactgcacattttgtaataaaaatttgtgcagttttgtaaaaaaataaatgtgaaagtgttatatatcaagtatatatctatcaaactccttagccggaacatctttgttgaatgcttttttatataatcgctttcgtagcatcgtaatatttgtatcgctacaacataacaatcgagcaataactgttggctttacttgtatctttagtagataacataaacgtttctctgagatggttgatccgggtaatgttttacttaatgtagaagcaagcgtaggataaatgagatcgattttatcgagaagagcttgccagtcttccggggccggtgtccaatttttcttatcatggaattgtgcatataatgatgaatttttaaaagctatctcttccgcacggttttcttgaatatgctttttatgtttgagtgattgtatctcattctccaagtgcgtgcgcatagtattcaaactctctattttcaagttttgatcttgtaaatgttctttcaaagaatgtaaagtttgctcattcaaggctatttgttcttcatagtcgtgaatctggttttcatagatggacaatcgttctttgttttggatatctttttcttgttgtcgaagaattagctgacttttttcttgtttgtgtttaaaataagcataagttgatagcgaaattactaaaaaacagactatcataacgattatgatcctcaaattagataccgcattcttggcttgttcttttgttagttttagttctgtctcttgatgatcataaagtgcttgatatttccggatagattccatttctccttgtgcatgaagagaatcatgcatacttgtatatttctgatctaacaggacgtattgcttccagtcattttgcttataggctatttttttgagggtggcatatgcggaaatacgtgtgtctagccttgtcgtttgttctttgcaaatattcaaatagaataaagcggaatctaatttatttacttgattgtaatagtctcctaatgtcgcatgaaaggaaaaatcgatattgtcagaaaaattattcgcttgcattctatccaaaaatgatttcattttcattaaatactgattcgctagcgaataatctttcttttctatatataaatttcctaactccgaataaatagaccattcatcgaaagatcgtattagggcaattgcgtctaagtagcaagcgattgcgctatcaggaagtgctagcatttgataaacacggcctagatcacgtgaagcgtaagcttgaccgatagaatcgttaatcgcacgaaaatttgagacagcttttttctggaaagataacgctttttcgtagacatcttgaaaagtgtagagtattccaatatagttatttactcttcccagtaaagcgtgatcttttatcgattcttcatcccgtaaggcttttagataacactcttgggcctttagtggatggttctgatcttggctgattcttcccctataataccaagctttcgcttttcgttccagatcgtctgtttcctcataataatccgttgcgatcgtgatcagcgagtcggtttcatgcttaacaaaagttttgtcttgcgcttccgtcagcaataaataataatgtgccttatcttttcgggataggttttctttgttctctatttgctcaaggagcattaaggcgctatccggatgttggggcataaggttctctatttttcggaagtctatggtttgatggcccattccgtcgcaagagatccatataataggtattagaattaacaggaaaacaatgtttttcttcatctgcgtattatttgttggcgataaagataatacaaaaaggcgaggatattccggctggaaagtccgacttttttgaacggtttttatttatgttgtaaatgcattgaataacagattgttacgctaggtgtaaactgtctgtttatggcttgtcaaatgaataacttacggtttgtcaagtgaataacttacgagtaggggtagccgtaagcttacgagttgggaaatgattagttattcacttgaggagccttttgggggagaaatatacttcgatgccacttgaagtatatcttctccgggcataggatatatactgtatcggcaaagtaagtatatctggataaaaacatgactttttcacccaaccagccacttctcgatattgcgggtctcggaagagaagttcacgccgatcttgaagacttcccggtcgtctccggcgaagggtagggcgtagcctttctcctcgatctgccgcagggcctcctcggcggttccgttgagcttgaactccatgatatatacatagcgatcggtttgcaagacgaggtctatacgcccgttcgaggtatggtactccacttgcgtgtacaggccgaccagcttgaagacgatgaagaggacgttccggtaatgcagctccgtgtctcgttccggcttttgcccggcgatcacctcgtagggtgtgtcggcgaagaagctttggaggcggtggaagaaggcgtcgtaattgccagaccgtatctcccgaacgaactgtccgatctcgaagggggtcttagaggcttgtatgctcgtatagaaaggaagtaggtatttgacgaaaccttcttccacctccttgttcgggaaacccagtcgataaatgccaaactcaggatcatagcccttgatggtaagatacccgctttggtagatgacgggtatgggattgttcgaggcggagtcgatgctgttgagcacgtcggcgtcggtttccgtgttggccatctcgtagaggtcgtaatgggtgtgcttgagcagctccacgaggtaggagggtgttccggtctcgaaccagtagtctccgaattccatcttagcgaaggtattcaataggctgaatggattgtatataccctcggacttggcggtgaaatggtatccgtcatagcgttgcttgagttttaggcaggtttcctcgtaggtcgtcatttgggtatcagccagttccttcacttcgtcttccagataggcatgtatctctttctctgtgatgccgcatatctcgacgtaccgattatccatcgacaggtccatgaggttgttgaggtcgctgaacacgcttatcttgccgaacttggtcacacctgtgagcagggcgaaacggatggccctatccatggtcttcaatacgccgtagaagggtttgagcatgttccggagccggttttgcatctcctcgtcgtgcaagttctgtagcaagggcttgtcgtactcgtctatcaggatcacggccctttgtccggttttgcggtaggcccggtcgatgattccggcgaaacggaggggcagggtcacttccgagggacgtgtcccatattcgtcttcgtaccgggacaggatgtcgtttaatatcttgtataagctatccggagagtcgtattgggagatattcaggtcaaaatggaggatcgggtattctttccagtccttttccagtttctccatggccagtccttcgaacaactcctttttcccttggaagtaggcctccagcgtggacagcaacaggcttttcccgaagcgccgggggcggctgaggaagtaatactgtccggtagtaaccaattgatagaccaaggctgtcttgtcaatatagagatagccgtccttgcgaattttctcgaagttctgtatgccgatgggataaattgtctggttcatatcgtcctatattttatgcgacttataagcaaagttacataaaatataggagaggaaccgtatctttagaagtaaattttcaacaataatatcttactatgaagtcgatttataattcgctgataataagatagataaatatgcttgtcggatttccgtaaaaacacgtacatgttttcacggattcacgtacgtgtttttgggaattcacgtacgtgttttccgaaaaacatgtacgaataaaaaacaagtctggaaaaatagacaataagtaagaagttttttactccttatacttagccaccataatcacggggttggattcctcattcaatcccgctgcgatctcattcaatcggcctttcagcttacctttctcgtaggcttccaccaactcattggcttctagtttctttatgaaagcgatcccatcgttattgatgatctttagtattccgtgttcgtaccacatattaacgggtgtctgatctacgaaatcgttattatatacgacacactcaaagatagcgtcctcttgtttatcatataccaagtcggttctggggaatccggtttctttctcaaaatcccattgtttctttgttgtttgcatgaaataataccggtcggtaagaatacttggataaagaaatacttccggggccatagagcggataggtggagtccttacgataaagggtttgatagagtgatcttgcgaataactataaatcgtatctgtagatggctctactaaaacccaacttccattttgggaaattaattcggtattacgaggtcccgcggcccaacctcctttcgataaaaacggtgatatcttatgctcataagggagttcgatttccttgacaatgctcccgtcttgtttggacaggagccaaaatgcgctttttctcagatttatataattgccaatctcatcgtagcagattaagttgtcttgatcgaaattgtatgtcttcccgctattgaaattaaaatctttatcgtactttaaagttcgcttaaagtttccggacaggtcgtatacgataaactggctcgagtagtagttgttgataaacagctcacctttctcctcatcgagggcaatagacccgatattcgtgtattcttggctaccttggccgctgcggttgatttttctctggccttttccggtccggtcgaagataaatatatctccgtcttgtccgttcttgtttctaaggattatgagatttttgccgatggcttgcatgctggctgaggttatgaattcctcattcgtttctaatgggatgtattccacatccaaaaagtcttgaagaatcagttccttcttcggataatttgccgtgatatccacggttaaaaagtcgttagccggttgcttgccactttcgcatcccgttatcaggaacaggatcatcgcagagattgtgagtataagtttcatggtagtatgtttttaaaggtgttcttttggcaaacatatgcttttctcactgtcagaaaaatattttatacatctattttcgtgaatgtgttgtttaacattatctttgcaagtcaatgaacgtgaatatggaagatgattttgatataagggatgcccggatgccggaaaacgagcgagagtacgagaacgtgcttcggccgctttcgctccgtgacttcagcgggcaggcgaaggtggtggagaacctgaaggtgttcgtcatggctgcccgcatgcgtaaggaggcgctggatcatgtgcttttgcatggacctcccgggttgggaaagacgacgttgtcgaatattatagcgaacgagttgggggttggtttcaaggtcacgtcggggccggtgctggataagccgggagatctggccggggtattgacctcgctggagaagaacgacgtgctttttatcgatgagattcaccggctgagcccgatcgtggaggaatacctgtattccgctatggaggattaccggatcgatatcgtgatcgataaaggaccgagcgcccgctcgatacagatcgatttggctccgtttacattgattggcgctacgacccgtagcggcttgctgactagtccgctgcgtgcccgtttcggtatcaatatgcacttggagtattatgatatggagacgctgacgaagatcgtgctccgtagtgctaatattttgaatgtaaaatgtgagttgaacgccgctagggagatcgcttcccgtagccggggtacgcctcgtatcgccaacgctttattgcgccgtgtgcgtgatttcgctcaagtgaaggggaacggagatatcgataaggcgatcgcttgcttctctttggaggcgttgaatatagatcggtatggcttggatcagatcgataataagttgctgacgacgatcattgataaattccagggaggcccggtcggattaacgacgatcgccacggctttgggcgaggaccccggaacgctagaagaagtgtacgagcctttcttgatcaaagagggctttatcaaacgcacgccccgtggccgtgaggtcaccgatttagcttatacccatctgggacgtagccgggtgggggaacaaggttttttatttgattagacagatagatatggcaggaggaatgaagcggctcgctaaagagacagccgtttatggattgagtagtatagtggggcgtttcctgaattggatgttggtaccgatgtacacacgtgtgttggccggaacaggggattatgggatcgtgacgaatttatatggttggacagccctgttgctggtcttgcttacttatggcatggagacgggttttttccgcttcatcaacaaaaaagaggagcaagagccgatgcgggtgtatgcttccgtgctgtattgcttgctgggaagttcggcgctgtttagcgtagcggttttcgccttattgccatctattagcgccagcttgggatatggcgaccatccggagtatatcgggatgatggcgggtatcgtggcggtagacgctttttgttgcattccgttcgcttatcttcggtataaggggaaagcatggcgtttcgccgggattaagttgctgagtattttcttgaatattatcttgaatatattcttcttgatcacttgtccgtggttgcatgcgcactatccggaggcgataagctggttctatcgtccggattatggggtaggctatgtattcgtggcgaacgtgtttacgacactgataaccttattgcttttgatcccggatatcttgccgggcatacgggcgaaagtagacggaacggtattgaaacaaatcttgcgttattccttcccgatcctcattctaggtattgccggtatctttaaccagacggcagataagatcctgtttccattcttgtttgatgataaggagtacgcgaacgagcaattgggtatatacggcgcatgcttcaagatcgccgtggtgatggtgatgttcacgcaggctttccggtatgcctatgagccgtttattttcgctaaaaacaagagcgatgataataagaaagcctactcggaagcgatgaaatatttcatcatattcgccttgtttatcttcctcggggtaatgttctatatcgatatcttgaagtattttgtcgggccggcttattatcccggattacgggtagtgccgatcgtgatgctgggcgagttgttcttcggtatttatttcaacctctccttatggtataagctgatcgaccagacacgatggggcgcctatttctccacgatcggatgtgtggccacggtctctatcatcttgctgttcggtccctcgtacggttatatggcttgtgcgtgggcatcgttcttttgtaatttattgatgatgcttttatcctattttgtaggacaaaagaaattcccgatcgagtacgacttgaaatccgcgtttctttatttcggagtggcgacggtgttatacgtggcaggcatggcactgccgatacagtctgaatggctccggttgggataccgtacaatcttattaggcgtattcatcgcgtttatggttaaaagggatttacctttacgagaactcccgtacgtaggacgtttctttcgttaatcggtaggttcggagggcttggacggcgtggcgattggcatcgtgataacgaagcgtgagcctttcgtataagacggatctgtctttatcttaccgtttagccggttaacgatcaagcgacataggtaaagccccaggccagagccgggaatgaaatcattggtcttcgtgaaacgctcgaatatccattcctgtttgtcttgagggatgccgcaacccgtatctgttaccgacagggtcactaaattggctccgctatccagatggtatgaaagtgtgatgcttcctttctccgtgaatttatttgcgtttgccagcagatgcgagatgatcaagctgaaataagcgcggttggtcaagatcatatcattctccttatcgccttccaccacatagttgatctccggcttctcttgatatttctttacctgttgcatctcatataaacaaagctcatggattcgtgtgggaacaagaggaagggaatcattgccgctatcgagctgggcgatctcaaggagattgttcagcatggaagtcaagtggtaacagttttcatagataatacggctgaaagcctgtttctcgtccatggagatatcgtcgttggtgatgagttccgagaaaccgttgatcgcgtttaagggagtccgtatctcatgcgacatattccggatgaaggcggtcttcatctcctcgctctcttgtgccttctggttcgctatcaggacctgctcgttggatttctgtaatgcttgataaagagatctcatcttgcctaaccggaaaaagatatagaacacggcgcataaggctagaagcaatagggatatatataggtaattctccttcttgcttttctgcaattccaattccaatgatttcttttcgatcaccaacttgttcgcccctttctcgatctcgagattctccattttcttccggagttcttgcatacgcaaggtatctagcaataccgcatactctttggatgtctcataggcctccttgtacatccggaggctgtcgtaggcggcggcttttgcggatacataggcgattacatgctccttgtaaagcggtatttgtttggagaaattgatcaaggagtcgctgaactcaatgaatttcatgtagtccttgatgtttaggtaataattggcggaagtatagtatagctcgtattccggggtggtgctagccgcctccggataagccttcaataacttttggaactcatggaaataggaagtggccaaatccttcccgatagcctcggcgctgatggcgaggttggagtaggcgcttagcaagtggcgcttgttagtcgcgtaaggacgtttgctcatctccgggatattggagtatcctaagatcgtattgagatagcgggttgcgtatttccctctctcccaagggtcggcagcgtaggcgcatagcatgaaataggtgttaggcaagaaattgtatgcgtatcgtaggggcagtttttcagcctcggtcaagacgttgtcgaaatattctttcccttgcttgaagtcctccttaagcatgttctcctccatgacgctgttgctgacagccataccaagtacataattgcaggctattttctcatagggagacaatttgtcgggttcctccagcttgaataggcaattcatgaggactttccttcttggttcaccggatgtgtagaatatgacgcgcgtatcttggatcattttcatgaacgatacgaggctggttctggcttctccttttagctcctgctcggctttggcgatatagacatttgcgctatcggtttggtccgtgttgatataatgccggagaatctcggtcaatgccgcttccttatagtaattgtcattcgcttttaaggcttcctgatagagttgtttagcgtttactaatatgtcatcgtttcgtgagatatccatcaagttggcgaggatttccagccttgtgcgctcggaggtcgttttttgcaaggcgcttttaagcgagtctggtgtagtcgtttgagatgaaacgacaaaggacataaataataagcataaatgtattagatatcgtttcatacaaatagaatctcttgttgtgtttattgtattacaaatgcaaatatacgtaatctcaccataaaaaagctattaaatagttagaaaaacaaacaattgaaatatctttgcataaatatgggacaagattaataccgcatggaaaaaggattgctacataaacagattatggatttttttgtccgtaatttcgacgtcaggcaggacaaagaggatgaactggacacgatagaatctattaagaagggagtcgaatttaaggggacaaatttatgggtacttattttcgctacatttgtggcctctctcggattgaatacgaactctacggccgtgattatcggcgccatgctgatctcgccgttgatgggaccgatcatgggattcggcttgggattgggaatctccgatttcgagttgatcaagcgttcgttccgtaatttcgctaccgctactatttttagcgtgattacctccaccttatatttcttgatctcaccgatcagcgaggcgcaaagcgagttgcttgcccgtacgcaacctacggtatacgatgtattgatcgctttcttcggcggtctggccggaatcgtggcgagctcgacaaagagtaagggtaacgtgattccgggtgtagctatcgctacggctttgatgcctccgctttgtacggctggattcgggttggcgagtggcaatttgtattactttttcggtgctttttatctgtattttatcaatacggtttttatcagtttggctacgtttgtcgtcgttcgtttgttgaaatatccgaagaaagttttcttggataaacaacgggaaaagatcgtgactcgttacgtgggtatcattgtttttttcacgatcgtgccgagccttttcttgagttataacttgatccggagtagttatttcaatgatcgggtacgtaacttcgtatcggaggagttgactttcccgaatacgcaaatcttgaataaggtcgttacggatacgagcgagaaaaaggaggtgaaagtagtcttgatcggccagacggtaccggatgagatgatcgctaacgcccgggctaaattgcctaagtatggattgaaagatgtgcatttagtcgtgcaacaaggcttcggacaagaggccacggatatcaatgagttgaaaagcctcttgatgcaggatttatataagaatagcgaggaggtgctacgtgcgcagaccatccagattgattcattaaaacgacaggttgacaaatatcagagttataggcgtttgacatccgagttgatcccggagatgaaggttcttttcccctatgtagtcgaggcttcttgctcgaatacgtatatcgtgaatacggagacggcgaagccggatacggttatgctggtttatctgaaaagtaagacgatcattaaagatgcggaacgtaagaagatcaaggaatggctgtcggctcgtgtggaaatgaaaaatattaaattactaatcgaataatttagactaatcagagtagaatgaagttgatgaaaagagtgtgggcggctttgttgcttttagccgcttccggccagttatatgccgatgagggcatgtgggtgctgaaggaattaaataagcagaatttggcgagaatggccgagttgggttttaccccatcctatgatcagttgtatagtgagacggatccttgcgtggcgaacgccgtggtaatcttcggtgggggatgtaccggtattacggtctctaacgagggattgatcttcacgaatcaccattgtggtttcggagccatccagcagttgagtagtgtggagcacgactatctgaaagatggttttgtctctcaaagtaaacaggaagaacttccggttccaggcttgacagtacgttacctgaaagagaccgtagacgtgagcgatcgtatcaacagccagatctccggtatcgaggatgagttccagcgtttgtcggcggctgattctatcggtcgtgtgatttgtgattccgtgggaaataatgagttcctagcggctgatgttgttcctttctatagcaataataaatatttcttggtagtgtacgatgtttatcgtgacgtgcgtatggttttcgctccgcctagctctatcggtaagttcggtggcgatacggataactggatgtggcctcggcataccggtgatttttccgtattccgtgtgtacgccaacgcggataataaaccggcggaatacaatgcggataataagccttataccccgagatatgtagcggaggtgtctatgcaaggctatcaagataaagattatgccatgacaatcggttttccgggaagcacggatcgttatttgtgctcttggggcgtgcaacagcgtatcgagaatagtaataagccccgtatcgaggtgcgtggcatcaagcagggcatctggaaagaggcgatgttggctagcgacgccgtacgtatcaaatatgcctctaagtatgcgggaagctccaattattggaagaactcgatcggtatgaataaaggattggcgaatctaaacgtgatcgaacgtaaacgtgcggaggagacggccttcgctgattgggtagcgaaagatcaggcccggggcgctaaatatggcgaggtcttgaatttgctggaaaaaggatatacctcgaccaataaatatagagaggctttgacctatttgaatgaggcgttttctagtggagcggagattattcgtttggcccgtatggtgcaatcggtggatattgaaggagctaccccggaagagattactgtctttttagaggatcgtatccaaccgttcttcaaggattacgagccgtctttggatcagaaggtactggccgcgatgatgaagatcgcgaaagaacgtgtatctccggagttcttgccggatatttatacgagcgttgataagaagtataaaggaaattatgagaaatatgcggcggatgtatttaagaagacttccttattgtcgtacgacaagatcgccgagatgttgagaaatccgaagcaatatgagaaattgagaaaagatccggcggcggaactgagcttgtccgtattggtgtctatcttccagttacagcagttgatgggtgatgcggagtatgatatcgctaagggagaacgtttgtatttcgcgggcttgaaggagatgtatccggagaaagccttgtcttccgacgctaatttcacgatgcgtttgagctatggttctatcggagggtatcgtccttatgatgccgcatggtacaattattactcaacggataaaggtatcctagagaaagaggacccgacgagcgatgagttctgggtacaaccggagatactggatctggttcgtagccgtgatttcggaccttacgcaaatgaaaaaggggaattgcagctgtgcttcctctcgaacaatgatatcacgggtggtaattccggtagcccggtattcgataagaacgcccgtttgattggacttgctttcgacggtaactgggaggcgatgagtggtgatatcgcttttgaaccggatttgcaacgttgcatcggcgtagatatccgctatgtccttttcatgatcgataaatggggtaaatgcccgaggttgattgaggagttgaaactggttcgatgagagaaaaaagagatgggcatccgtgatttccgcggatgcccattctaaggagcttataatgcccatcgtaaggtgctttgaatgcctattgtaagcgccttacgatgggcattgtactaaatgcctaatttagacttgattgctttcggtattgcgtccttatgcaccatgatgtaaatcgtcttggcacggacaaagctatctgacatgttgaggtaaccgccgaatgtattacgttcggttccccaagagttcttcgtgatataatatttcgtgccgttttgatccttggcgatgccggtaaggtgcatcaaatggtcatcggtcgtgacgaacgcctcgaagccttcttgacggacctgcggggtgacgtttacttccgggaaaggtttctcgaatttgtagacttcctccagacgttccttctcgtccattttctcgaagcgggcacggtcggtagtcgagtaatcttccaccttctttacctccgggttgatcgccacgccattcttgaaagagaagcctttctcgctcacgtcgccatcccagcataccgtgtaaccgttattcaacgcataatccgctacttccatcatttcattcaatggtaggttatacatttgcgcatgctcccagttatcgggaacctctacctcgaatttctggtaatacggatgatgcgtgaagcttgtcagctcgatataattgtccatattcaaccctagggaggcggcgaatgtcttcggggtatattccttgccttgataggtgaatttctccggaagcttgcctaggtaggtatcgaataggttatcgattagtttgtaatattccgggctccgttttttcatatccacggcggtcgttgcgatcgccttgatgtattttaccatctcggcatgattgtgccggtcggaatcgtagttgatacccgagtacacctcttcaggaacgatacctacttggttgaaagcgttcatgaaggtgtgggagagacttccttgaccgatattacctctaccttggcggacataattatcctgcaactggttcatgtatttctggcggacgataaacatctcggagagatcgtacgtcccttttcccatacggagtaattcggactccatgaaagaggtcgtggcgaaacaccagcaggttcccgtggatgcttgattcttgactggcgtggcgggtacctttactacatccgtaaattggtagccttgagcgaatgtgctcaaggagcctaacgctaaggcgcatgatagaatgaatgttctcattgtatatgaatttaagtttatattattattgtagagacggggcgtgcctcgtctttactatcggatgtggtgattagaagcctctttcgaattgggtccagaatgagtctcccatttctctccagcgtagcatcgtggctccggcgaaatcggcggtatatccggttaggtattcttttgcggcctcctcaccttgttgggtaagaatctctttgtaacggctctctacgaaaggaagttctgtctgccctttctccgtaaaatgggcgatagatgctttcatacgatctttagtcgctccccaacgtacggtggcgagtttgttggcacgacggaaagcccatacggcggcatcttcccggtaacggtgctgtccgcaaaccttgaagcaagccgggagatctttcgtcccacagaagatggggatgcgggggctttgtccgggattatcataggccatccaaaccacgccgcctaccgcgtcgggcagccagtcacgcaattggatcacggtagagtaggagcattgcggcacggctacaaggcggtagcgtttcacggcatccggtctgagtccgtttaacatgtttaccatatccgtagtcatccacggattcgctaccgggctgataatggtatctgtctcgttactatcttttttcttgacggcgactttcaggttcttcgtcatatcatattccgtcccctcatacgtctcggagagaagggccatcacgtcggtcacgtcaaccggtttttccggttttacgctgatcggaagttcctcggcatcataagaaagatgcaaggatggcgccagcttattcaaaatgaaaaactcgcggatgctgaaggatttcaattctcccgaatagttcccgccgccataggcctcccagaagcggaacggtttcttcccgtcccagaagcccatgcgcttggctacctcgaatacgttggcggaagccatgcaattctccttgtcgctcggatctaccttggagatacgggggatattggccgatacgcccacatgatcgtcggggatgcggatcgccgcccatacgccaccgatcttatccggaccctcgccgaagacctcgaaatgccatacctctttcggatccgctatcgtaaggcactcgccccagtcgccatatccgtatttctcgatcaactcgcccattaagcggatcgcgtcacgggcggtcgtgcaacgttgcaaggcgattcgctgaagttcctcgatcatgaacatacctttcttgttgacaagggctttccggccggtgatcgttgtttccccgatgcctagttgcttctcgttcaggcaaggataggccgtgttgaggaattgatacgtagaccgcgcttcgggcagcgttccttttgcgatcatcccccgggttccctcggcgtattcggtatgcatacgtccggtatagaccgtggttgtcgtatcgtgatcgtacgaggcggaaggtacgatatccatccaagtgcggtaattgctatcgcaggtgtggctggtcatcacggaaccatccgccgaggcttttttcccgaccatgatactcgtacaactctccgggtttaacaccggctccggatactggatctgttgcgccacggaaacggataggctggcgtaaagcatgattacataggtaaaaagttttttcatctttcttgtattttaaatgtttgtatcaattgtccgagaagatttttatgaccgtaaatatacgatttatttgttaattcttgaatacgatacgactataagcatggtataagacggaacaagtctactaaagtcatgaaattatatattaggtgaaagtgagagcgtgctaagaaaggcggattgccctaaaatcactttctgggcaatcctataggttatttcaaatatgaataaaacgaatggcctattcacgtcctccgcctaaggcttgatagaggttaataaccccttggatttccgtgaaacgattagccacttgggttagttgggcatttaataatccttgttgtgctgtgagtacttctagataggttgtcgttccgtgctgcataagtagggaggtacttttataggctctttcgagagactctatctgtttttcaaagtacacagccttgtcacgtgctgtatgatattgcaccaaagcatcgttaacctcggttcctgcgttcagtaaagcttgctcaaaactcaaccgggcctcttcttgttgcgctttggtgattttcagttgtcctagaagttgtcctctggcaaaaagtggctgggtgagtgagcctactgccgaggccagaaacttacccggattggtgatgactgcacctgccgagttagtccagccggccgaaccacttagggtaatagagggataaaaagcggaacgggcttgattagtggcgtaaaatgcactttccagagcatgttccgctgcccttacatcagggcggtttgataataaatagacgggtatgcctactgagaaatgtttcggcagttgctggttttccaattcacctctttgtatggtatgaggtgtatcagccagtaacaatacaaggctgttctctacctgattgatttgttctttcaggtcgaggatggatgtacagatgctgtagtacgtagcttccatttgggaaacagctgtttcgtttactatgcctgcattcattaaggcacgggtggaattgaccgtctctttccaggaggaagcggtttgctctgagatcttcaactgagcatccagcataagcagggaataataagtattagctattccggcgattagctgtgtacgtaccgcttgccgataatcttgactttgtgcgtaaagagcttgcgcctgctttttggcattgcgcattttaccaaatatatccagttcccaactggctgttatcggaatcgaataagtctgtgtagccttatgggagtcgaaactgctcaccgctccttgaggagcgaaagcgaaggcaggcaggaaagctagcttggctgacagtaaagctgcttcagcctcctctacacggagttgtgcggaacgatagtctgtgttgtttgccaggccatgctcaatgagtgtttggagctgcgggtcggtgaagacctcccgccagctcatgtctcccaaggatacagtatccgtttgagcggtggcctctgagccgtacagatctgcggaaacctcagaagccggtttgtattttgtatatataccacagctgtttaacataacgcatgatacagctagtgtgatgatatgtcgtttcattctttttctataattgtaattaatgggattctcccgatttatttatgattctcgcgttcgtttgcgctcttttcttgctcttgcaatacctgtaggtctgcctctacttccatcggcttgcggatcttctcttgtaagaactcgaaagcgatgtagaatactggtacaacgaaaagcaaggccaatgtaccgatagccataccgccgactacaccagtacccaacgaggagttaccgttggcgccggctccactcgcaaacatcaacggaagcataccgaagatcatcgtcaatacggtcatcaagataggacgcagacgtacttgggcggcggagtaggctgattcgataatacccatgcccttccgacggcgttcgatggcatattccgtaatcaaaatggcggtttttgccaataggccgattaacataattacaccggtttgtagatagatattgttttccaatccgaataacttagcgaagaggaatgaccccatcaatccgaaaggtacggaaaagatgacagcgaacgggattaggaaactttcgtataggcatgcgagaatcaagaaaatcaacaggatacagatcgcatagatgaatatagtctgtgtacctccggatgctgcctcttcacgcgatatacctccatattcgtagccataaccggcaggtaggctctggttggctacttctttgattacttgctgcacctctcccgttgagtaacccggagctgggttcacgtttacggtaatggcactgaataggttgaagcggttctccacttctgatcccataatcctcttaagagtgacgaactgactgataggagccatctccgtcccgttgcgtacgaacatattgtctaatgcttgctcatcgagacgatattcaggagaggcttgcaacatcacgcgatacactttaccgaattggttatagttggaaatataggcaccaccgcaatagctaccgagaacatccaatacggaagcgggcgagataccggctcgtttacatttggcggcatctacatctacagagatctgcgggaagttcatggcgtaagagctataggccatcgctatttccgggcgttggttcaaggctccgaggaattgtaatactgagttatagaaaatcgtcttatcgcctccggtcttgtcctgcatgttcaactcaatggagttacccatgccgtaacccgggatcatactagtttggaaactaaagatctgtgcttccttgatttgatggaattgtgcgttgagccgggcaatcaccgcatcggcggtgtgctcttttcccttacgctcatcccagtctttcagtcggatgataaccgaaccgtaagaggctccttgtccggagataagcccataaccggcaatgcgggcataatgctcgatctctggcgtactttccaggattttttctattttggccattattagcttgttttcttctagcgtgctacccggagcgatggacatgtttaccatgatcgcaccttggtcttcttgagggaccaaactggtttttgtggtcatcatcatccagaccaacagcacaagcgtagcgattaatgatacccataccatccaacgatggtggatgaaaaacatcacgcctttcttatatttttctagcacagcgttgaacgaggcgttataagcggcacgtacacggccgttgatactcttggtactcttgttgccatcggatggacgcatcataatagcgcaaagcgccgggcaaagtgtcaaagccgagatcatggagataccaacggaagttgccatggtcacaccaaactgagtatagaaaattccggatgtacctcccatgaaagttacagggatgaacactgccataaatacgcaggtacaagaaatgatcgccatggtaacatcgcccatggcatctttagtcgcttgatagggcgacttatagccgacgtcgaatttcgcctgtaccgcttctactacgacgatcgcatcatccaccaccgtaccaatagccaataccaacgcaaaaagagtcaagatgttgatactaaatcctgccgcaaccaagcaagcgaaggttccgaccaatgagacaatgatcgagatagagggaattaacgtactcttgaaatcctgcaagaagaagtaaaccactaagatcacgagaatgattgcgacgattagggtctccaccacattatagatagaggcgaagaggaagtcattggaactcatcatagtcatgaaagaagttcctttcggcagatcctgctcaagttcgttcagcaagttggtgatctgttcgttcacggcggtagcgttagagcctgcggtctggaaaatcaagaaggttacggctgctttaccatccattttattatcgaatccataagtcaaagttccgagctctacatctgcgatatcctttagccgtaggactgatccatcattttgtgatcggatgacgatctccttaaattcgttgacatcttttaggcgtccgcggtatttcatcgtgtattggaatacgttttgtgagttctcgcctaattggcctgttggagcttccaggttctgttcgcctagtacggcagttacgtctgatggtaccaatccatattgagccatacgatccggcttgagccaaatacgcatactgtaagcatcacctaacatcatcacatctcccacaccttcgatacgtttgatttgtggaataatgttaatgtccaagtagttggcaaggaatgtttggtcgtagcgaccatcatcacagactaatgcgtcgatctgtaagaaactcgtctggcgtttttgagtggagacaccaatcttggttacctcggccggtagtaagccttgtgccttagagactcggttctgcacattaaccgctgccatgtcgggatcagttccctgtttgaagaatacctcgatagttgcagtccctgcgtttgtagcggtagaagtgatgtacatcatattttccacaccattgatgctttcttccaaaggcatgatgacactgttcatcacagcgttggcatctgcgccggtataggtagctgatacatttactgttggcggagcgatattcggatattgctcaacaggtaacgagaaaagcgaaatcagcccgactaccaagatcaggatggaaatggatatagccataacaggccgtttgataaatatattccctttcataatgcactgatttctttttatttaacttgtgttccctcacgtaccaatccggctccttgtgatacgatttcttcaccggctttcagtccgtctaatacgacatactcgcgtccatcgttcaattcagctaccgtgatcaaggatgagactgctttgccatccactactttatataccattgttttatcctgtagacgtattgtcgcttcctgtgggattacgatacaattctcatatgtactggggatgattaccgctccagaggctccgctatgtagtaggcgtgcctcgtttgggaagacagaacggacggttaccgtaccggtctggcgatcgatcacgccgctgatcgactcgatctttcctttatgttcgtagatggagttgtcatttagtctaagttctacttccggcatgttcttcagtgcgtcatccatggaaccatattgacgggtcaaggataaaagctggttctcattcatagagaaatacacatacatgttcgagttgtcggatactgtagtcaatggctgtggaatattggcgctgactaaggctccgacccgatagggtaacgctcctaccactccgtcactcggactttttacttcggtataagagaggttgttgcgggcgtttgtctcttgagcctcagcttgtgccaaagctgcttgtgcggtgagataactgttctcggaggtctttaggctgaactctgatactactttctgggcatatagctctttattgctgttgtaggttaattccgccgtggctaagcctgcctttgctgatttaacgttggctatagccgtattcaaggctgccttgtagggtacttggtctatgacgaaaagaatttgtcctttccggactttctcaccttctgttacgcaaaggcgctcgatagttccggatacctgtggataaatatcgatatcctgccgtccacggatcgtggctgaataagaggtagagaatttcttgtcacttactgttattttcattgttgcataattggcattcattggagcttgaggtgtttgtttgcaagacaccaatactgccgtaaaaccgactaatcctattagtctcatccattttgaactcataaccatttgtatatccttttaaaattccgcgcaaagttaaaaggagatagctcatttttatataccaaatgtgctggtgaagtgttctgattgtaatatcttgtagtatggtttctcaaaaagaaagtatgagatgcttttatagcttatttataagatgctttctgtattgggtaggcgacatacccgtgtgtgccttcacgtatttcccgaaatatgagagattgggaaactccaaataattggctatttccttaatggatttttcagagtatttaagtagctcggtgatatcctctatgataaattcattaatgatatcgaaagctgtctttccacatacctgtttacatatcaccgagagatatttggtagtgataaagagcttatccgcatagaaagagacggagcgtacttttacttttgatttagatagtaattctataaatcgattgaataaaagatcgccttgcttgaacatcgtgttgtttctggatatacaatatgtatccaaattacctagcaactcatagaatatagcgctgataagggcagacatgatccctttctgataaggattgtctgttgcttttatcctggaaccaattaattatgatataattcgaagatttgtgctcccttttgtcctattggcaggactgggttttgttcgagataaaaaaacttgtctcgtgtgccaccacccaagctgactaatctcctgactatattcatggagatagcgatccccttgcattccaaatcatcactaccgatagcattgcgaagtacggtcagaggaaggcaacacagaacttcgttggctcggattatccgtgtcttggtattcacgtctacttgcaatgtgccttttgtgcatatcaacaattttaatgcgtcaatcttgacaggcttggcatggggcacatgaggaaggcggaggcgattggcaaatgctatatctccatcaatatagtcaagcacagcgttttgcgataaatcttctatggttagctgacgtactagttctgtttgcatgtcttcaggactttttccagttttggcaaaaataaggaattaagtaccacaaactttgtaggtacgcataatttaagacctttataaccttaattaaaaaatgagcccggttcgatgccgagctcattaggaagggttatgaatatctatttttatttactgcgttttttctttccacgaggagcgtcctcatagaatttacgcttcggtttgtcatcgccacggccggaacgtctaccgccacggtctccacggtcgctttcccgacggctatctctgccttttctaccgctatcccgtcggtctctgaaaccgtttccgctacggctacctccacggctaccacgactgcctttaccaccttcgcctttcgcttgcgccggttctacggagatacgtcgtccgtctacctcgaagccgttcatcgagtccatgacacggttggcttctccctcttctacctcgaagaatgagaaattatcacgtaagtcgatacgaccgatacgaaccttacccggtacacacttattaaccaactctataagttgaggaggtgtaagctcgtctgtctttccaaagttgataaagaaacgggtgtagccttcttccgcttcgcctctaccaccacgtttgcctctttctcttggggcgctctcgtctacaacctcgatatcatcgttatctttataatagtcgatcatccggttgaactccaaggatacgacacgcttgatgatatcttccttatccagccattccaatttacggtagatagaaggcatcaaactagcgatttcctcctcgttcactttcactttctcgatctggtccaccaagttgaacaattgcttctcacagatttgctcaccggtaggcatcttgcctttatcgaatttcttgttaatgattcgttcgatctcgcggatcttgcctttttcccttacgtggcagatagagatagcgatacccgtttttcccgcacggcccgtacgtccgcggcggtgggtataagattctacctcatccggcagaccgtaattgattacatgggttaagtcatccacgtccaaaccacgtgcggctacgtccgtagcgaccaataactggatattcttgatacggaacttctgcatcacgtaatcacgttgcgcttggctcagctcgccgtgcaaggagtcggcgttatagccgtcttgaatcaatttatcggcgatctcctgtgtctccttacgggtacggcagaagatgataccgtagatgttcgggtaataatcggctagacgtttcaatgcgagatatttatcctgcgcacgaaccatgtaatagatatcgcggatattcttgtttccctcgttcttcctgccaatgacgatctctttcgggtccttcatgtatttcttggtgatagaggcaatctctttcggcatggtagcggagaagagcagcatattgcggttttccggtatagccgccaagatctcgttgatactgtcggtgaaacccatgttcaacatctcgtccgcctcatcaagaatgacgttctttacgttgcttaagtcaaccgtcttgcggttcatcaagtcgatcaaacgtcccggggtagccactaccacgtgtacgcctctcttcagtgtcttgatctggctctctatactggaacctccgtatacagggagaaccttcaggttatcgatgtatttagaataatcgttcaaatcgtccgctatctgtaggcaaagctcgcgtgtcggacaaaggataagcgcttgaggctgatattgagagacattgatcttttgcaggatcggcaggccgtaagcggctgtcttgccggttcctgtttgtgccaatgcgattacgtcgttatcttctcccagtaagaaaggaatcacttcttcctgtacgggcatgggcgattcgtagcccatctcttggattgcctttaatatcggtgcggcaactcctaattcttcaaatgttttcaaaatgcgattgtgtatatatgataatattcagtggccgcaaaggtacgtaaataattcggattctataggattgttatgctaaattcgctaaaaatcagcgaaccacggatggtttttacctattgggagagggtgggcatctcggtcgcatgcgaaccgtgtcgtttatttgttagcgaaacagctcttgtctgatctttctgatagaaatagggcgtatatcgtgacatgtcctttttcttgatactatgatatagccggagggtaaggggataaagtggtgctttgggggaaaatagtgccttttccaagtgtgataggtggcgaaagaccgtttttcggtatcttgttaatcaatagctgattgcgaaatatttcttccttatttgcgagcgagccgtactaagtcccggaatattcgattctctgaggctttagattacaatgtgtcaaaaagtgacagtttgttagaaacggtctgaacggagattttctatggattaagataaatgaaaagttaaaagactttttgttgtatatattaaggccgtcttgagcctgtcttgcccgatgaacctgcttgttgccatgatggaggaatcaagcactgtgatttgttaccgtttataaatctaaaatagagagcttatgaaaaaagaaagaatgattattgcttttttgagtttacttttcctgttgccgggatgcaaggaagagaaaacacaaagtgtctttgatgcagatgagtttgattgtgttggttggccacacattagaaaggttactattacaaatgtaaattgtgaggcagagggaatattccttattctagaggattctttagtttattgtgatgatgagatagttataccttataaaaatcactacggaaaacgtttagaagtaggcttttgttttggggatagaaagagatatccattgtgtaaatcggattcctcagtaattgatatttctgtactttctgttcgagaattgaatgaataaactttttaatatgattgtattatgaaaaaacttttttaattattagtgttttattgggtatattgttttatcctgtaaatgctcaacagcgaatagtggagggatctaatatcaatatatcagaggttccttggcaggttgcgattcaaacgaaaggtgtttttaacggaggagggtctatattggctccaaacttgattttaacagctgctcatgtggtggaaaaatatactgcaaaagaggttaaagtgggagttggtagttctaaatattcaaatattggtgcgaattggtattctgtttcaaatattgtttatcacccttctttggatattgctttattaatattgtctaggcctttgtcttattctacaaatgtaaaagctatagatattctttcagctaataaggcttcttattataatgtaggaaatatacttcgagttacaggttgggggattacttttcttgtgattgatgatccttttaaagaatggaaaatgtcagatgatttaaaaaaggtagatcttcctattgtttcaaattctactataggagctgctaatagttttgttattacatatgatggtaagcatagtccttctaaaggtgatagtggtggagcattgacaatttgggattcttctttacagagacatgttgtaattggaactgtacatggaaatcctagtactcagagagcttattgtgcgtatgttcgatcttcctccttcctcgacttcctccttccttactatcccatatccatcaccggtggttcagaccaagtctgttcttcttcaacattctctgtaagttatccaaactccacagttacttggtcatgcacggggcctttgcgaataacctcgcaaagcaatacttcttgtacggtctcttctaccggtaacggacctgccgtattgaaagccacaatcaagagcggaaagtaattagtggaggctatacctcttgtatgatcacctatcggaacactgtgaatggaaacgatacatggtgtacgagccattccggaaatatcttcaccatcgagtctgattataatttgagttcttatgaggttcggttgctgagatatccggggttgaatgtggttatgacgaggaccgcctcgaaaggtgataatgatctgactaatatgctctctccgggttggtatacaatggaagctcgtttgttgggatgcaagaatggagattgggtaactactggtgaggtagaggctgtggattgctcctcaaattatagcttttctttgacaccgaaccctgccaccagcctagtaacgttaactctaaatgatgtaaatacgcctagtccacgtatggaacctatgtttacgacagaaaatggaggtgagtatgaagtacaaatctggtcggaaacaagcttgttgaaacaatttactttcgatcgtcctatagttgaaatccctgtatcggaattgagaagtggaaggtattttgtgctggtttttgtgaacggcaagaagctgactcaacaattaattatcaaatagaacaggcataaacgtggagaattaccgagagccatcgggtaagtgaatcttttccgggtggctctttttcttaataaagtaatatgtccttgagcctttcacgtttcttatcagtaagacgtaatcctttcgacaaatatttctcggtggaaccgtactctttcttgattttatggaaagctaggtccatgagcccctcgttggccgtaaggaagaccgtaatgctttcttgggcgtctgtggagagatgtttcacgatatcagctaaatgactcgtatcgatatattgattggatgtcaagtagtcttccatgatggcgtcccggggaatatccaaggcggcgagtaacatggcggtgagaaacccggtacgatcctttccgtaggaacaactgatgagaatggggtaattatcctcgttctggaactgttccagtaccttggcgaactgatcggtattatctgtcacgaattgcaggtactcgtcttccatatataccccggcgtctcctttccgcattcgtccctcgataacacgttggggggcatcggcgatcttgccgaccgagatggggatttgcaggatatttgctttcgtatatttgataggggcggtgagggtttcttggttcgtacggaggtcgatgatggtcttgatccctagattatccaatcggatggagtcccattcgctcaagctgcttaacttgccggagcgaaataccttgccccatttcaccgtcttcccgtttgtagaggtataaccgcctagatcccggaaattctgtacgctatccataaccgccgagcgtgccccgatgatccgtgggtatttatcattaaaagaaaggcggaaatacttacgtgatatattatcgttcgtgatgtaagtagctacgccatccttgatgttggcgtaaatgatcggggactcgttggtgaaaagatccgggttgtcggacacggtcatcttgacaatcccctccattaccggatcggtttcccattttatcacgtaatttccgatgtcatcacgtaggcaaatagctcgtatgtcgggtgcgttagaggaacaacccactaacaggatcacactggcgaatagagagagaatctttcctaacattgtcttctatgataataagctttccttacaaagatagtaaaacaagtttttcccgcttcttcattaatgatatttaagactgactaacatacttcgccgcgaactccttggatatataattatcatagctttggcaaacctcggaggcgaggtccattccgcagcggatgatttttccccaagtatcctgatccagagagggaaggtcggcatggcgtacgtcatactttagaagtccgtagataatacccgcgttaaaattgtcgccggcgccgatggtactaagcggctggatttgcggggaatcgaaatgtcgtgtgaaattacgggtgtggagattgactccgtttgccccgtgagttgttaagaaacgatcacaataaaactgaatatgctctttgtaaacctcctgtgcgtcgctcttgccataaaggttctggaagtcctcgtccgagccccggacgatgtcggcgaattccagattttccagtacggtaggcatgaggcggatcgcctcatgagcgtgtgccttgcggaaattgggatcgtaatagatgatcgctttccgttcttgggcgtattgcagaaattctaccatacgagtccgcaagaccgggttcagggaataataagagccaaacacgaaaatatcgtctttctcgatcttaggcaggggcacctccagccgttgcgccgggtaatccttgtagaagatataattagcgttcttatcgtcgtccagaaaagcgagtgatataggacttttcccatcggggaaacggtctacgaactcggtcgtgatgtggttatcttccatgaaatcccgaatcatgtcgccaacccggtcgttgcccagctcgctgataaaggatacggggacattcaatcgacctaatgatatcaatccgttgaagacggagccaccgggaacggccttctgtggttggtcgttcctgaaaatgatatcgaggatggtttctcctataccaaagacttttctcatgactatatactggtttgttattcgttcttgcttagctcacggctcttggagcctaagtagcccccgtgatggcgcttggcgtaatccttgttggtgaaatggatacgcttcatggttccgaccacgaggatatcgcctattaccgtcatgacggtcgtggaggtagtcggcgtaaggcctaacgggcaaacttccttgggagcgccggtcaacaggcatacgttcgcctcggcggctagaggactatccgggttactggtgataacgataaatttcatgtctggcaccaaacccctcgtgagatctaccaattccaccagttcacgtgtctttcctgagttggagatcaataacatgatatcgttcttgcatacgattcccagatctccgtgttgtgcctcgctgggatgtaagaaaaaagcaggtgtaccggtcgagctaaaggtggtagcgatattcaaggcgatttgcccggctttacccattccactcatgatcagttttccacctaggtcgtgtacatgtttcactataagcgataccgcttcctcatatccgggtgtaacgggtatgttgcgaaccgcttccgcttcctgctccaataaagaggtgatattttcgtttaccatattgttgattgattgttttacggcattcctgcctgaataacgatcgcgaaagtatttatatttactgatattggcatcatctatttcagacaatttatctttttaagacgtttgcgaattcggacttcggcttccatttcgggtatccggtatcttgtgccagtttataaccgaggtcgaagaataattgtacttcttgtaacagaccactgtaatcatccgtgtcgggatgggtctggtcggtcggtttgtggtaagtttccgcccaataatgtgcgatatgctctttggcccactccttaccctgtttgcggttgtcgttccaacctttggcgaacatggccgggatgcctttttgtacgaaagggaaatggtcggagcgatagaacatcccgttataagcgtcggggtcgggcatgatgtaacggttgtatttcttcgctagctcggctagggtatcatccagctcggagttgccgtatccggtgatcgtgacatcgttgttctcgccccatagcgggaagacatccagattgattacggcggctatcttatcaatcgggaacaacgggtgctccacatagtatttcgtaccgaggaatccggtctcctcgcaagtaggggagaggaagacgatattccggcggggtttctctttcaaggcattgaaacaacgtgccatctcgagcatccatgcgatggctacggcgttatcggtagcgccgttgatgatactgtcgccgttgatcggtgctccatagcctagatggtcccaatggcctagataaataacactctcatccgtgttcccgctaccgggaatataaccgattacgttggggctttgctggcggtcgaaggtgttcctcatcgagacggttaccgtagatttcaaggagatgggcttgaagtctggcgatttagattgctcgattagttggtcaatgtcgtagccattatcggccagcaattgcttggcggcattgaattggatccagccgtttagcgggcaatgataggcatcgctatcgctgtccacatacatcttagattgggcggaagctcgtacgaccgaccaaggatagcccgctccccggtcttcatggatgatcaaaactccttttaatccctgtcgggcgccctcctcgaatttatacatccaacgaccgtaataggtcatgatatcaccgttaaaataatccgtgttgtcgcttccgagtcccgggtcatttacgataacgaccgctactttatcctgcgggttctcgattccctcgaaatcatttttcccatactcgggggctacgatcccatagccggcgaataccagttctgcgttgtctatatcgatctccggctcgatccgtgcggagaaagcggtgtaaccttccaaccaatctaaggggattttccctttcggggtctttaggaccatcgggtccgggcatcgtgtgcgtgaggatatgatattaacctgttggaaataagaatcgccgttgatgggtttcagcccaacctctttcatttggtgagcgatatagttcaccgcacggtcggccccttccgagaatggtttacggccttggcaggagtcatgcgagatggcctcggtgtatcgctttaaatgttccgtggtcgctacgcttttcgctttctctatatcattacttcctcctccacaagcggtaaaaaccaaggaagtgattgttagtaaacaggttattattttcatgtttctcatagaattacaatgttttttcaatcagccattcacctaagttgcgagtggctgcgtcgaaagcgacccccactttgactacttcccgttcgtcggccgtataaggaatcggatagcctcgatcgtcgatttgccgaatcgcctcttccgccgtacctctcagcttaaactcgaatacgtagatgtagcgaggagtttttacaatggcatcggcacgtccttgggccgaacgtacctcggcctcggtgaattgccctagtagcttgaatacgatgtagaaaaccacttggtaatgacgctcggtccggtcattcagctcgtagggtatgtcggcgaagaaagcctttaggcgggtgaggaaagcctcggtgtttccgctttccagctcttgaatgaactttccgatataaaagggagtctcggtttccggtaaatgcgcatacatggaggcaacaaaattcaaaaatccatatttaacttcctcattcgggtatcctaacgtatataaccgaaaacgttcatcgtagcttttgattgtcaaatatccgctttgataaatcatgggcacgggattattgatgttcgcccgatcgtccgaaagggatacctcggatacctctatcccgtccagctcccgtatatcgtaattcgttttccgtaacatctccgccaagaatgtcggggtaccggaagcaaaccaatagtcgtaaaagacctgtttactcaacacgttcaatacgctaaacgggttataaagggcgataccgctgcggaaatcaaaatggtagccgtcgtatcggcgtgtaattttctcgatggtatcttcgtatgaaagcttattcgcctcggccaaggcataaagctccggctggaaagtcgcctcgatctcgggcaatgtcatgccacaaagggccgcgtattgcggggctaggctgatgtcgttcaaatgatttaggttgctgaaaataccgacttgcgcgaacttggtgacaccggttatgaatacgaagcgcagccaaggatcggcatctttgaggaccgtatagaaagcggtcaataattcccggaactcgttctgtagctcttcgttgtgcaggttcctaagtaatggcttatcgtactcgtcgatcagtacgaccaccttccttccggttatctccgccgcccttcgtatgatggtcatgaaccgtccggaataggtgataccctcacctccggtatcatatattttttcccattccctcaactggcgttccagcatattctccaatgccttgcggctatcgtacaactcggcgttgaggctgaaatgaagtaccggatgctctttccactcggtctctagtttctctatggctaatccccggaacaattctttcttcccctcgaaataagccttgaatgtcgatagcagcaagcttttcccgaatcgccgggggcggcttaggaaataagggacaccttggtatgccatttgataaatgaactcggtcttgtcaacatacaaatagttctctgtacgtagtttgtcaaaactctgtatgcctatcggtaattttcggacgatatttcccatagccttatctgtttaatttacacaaatgtaggtattttttccaaggaggcaaatagatcgaaaaaaacacgtacgtctttttccggaaacacgtacatgttttttgaaaaagacgtacatgtttttccggaaagtctttcgtacctttgcgggctgatacaaacaagaaggaaaatggattatatcgctcatacattgccgaatggacttcgcatggtacatctcccggttaattccccggtttcttactgcggtttcgccgtgaacgccggtacacgggatgagaacgaggatgaatttggcttggcgcatttcgttgaacacatgatcttcaaaggtacggagaaacggaaagcgtggcatatcctgaatcgtatggagaacgtaggaggggagttgaatgcctatactacgaaggaagagacctttgtttattccatttttatggaggaggattttggccgggcgtttgagctattgaccgatctggttttccattcccaattccccaaacaggagatcgagaaggaggtagatgtcatcttggatgagatcaattcgtatgaggatagtccttcggaacttatattcgacgagtttgagaacttgctttataagggtcatgccctcgggcataatatcttaggggatgagggatctcttcttcgctttgactccgagtccggtcgttctttcatgcgtcgtttctacgccccggagaatatggtgttcttctcgatgggacgaaaagacttcaagaatatcttgaaatcagcggaatccgctttaagcgatatctctttcccgatggctgaacggatccggaaagctccggaccccatcgaggcttgcgtacgccagatccataaagatacccatcaagcccatgtactgatcggtggccgggctttcagtatgcacgacaaaaaacgtatccctttgttcttgttgaacaatatcttaggtggtccgggcatgaataaccgcttgaatgtctccttgcgggaaaagcatggcttggtctataacgtagaatccaatataacctcttataccgataccggactagccagtatctatttcgggacagacccgaagaaccgtgagaaagcgatgcgtttggtgcataaggaattggcccgtttacgtgacgtaaagctgtccgccactcaattagccgccgccaagaagcaggtaatcggtcaactgggcgtgtcgggcgataaccgggagggtcttttccttggcttaggaaaaagctacctccattacaaccgttacgacaccctccctgaagtattcgcccagatcgagaaaataaccgccgggcaaatcctagacgtggcgaatgaggtgttcgctccggaacggttgttttgcttgatttatgagtgaggctaattatggaacctatacccaacccccaacatcaagttattcggattatgaaatttgtgcagttggtatccgacatgcaggaataaatttcgtgtaaccgataccttgagggctaggatctggtataatcctttcaggtcgcccttgttgtaaaataaattatgtccgactcctatattgatcgagaagaatggcatggtgaattcgccacgggcagagaggccgataccgatttgctcatggaggggcgggcggtagaatcggggttcttcgccgacttggatgatctcgtcggaataaatatttgcgctttcgtcatattggccgtctagggagatacctgcttttaggaaccggttgaatttgtacatcgggttgaggttgaatccgaggatgccgaactgacctggaaaaatatgggcctcatcacctagcataacccccttagcacgggtcgcaccatataggatgacatcgtaactgacacgttgccaaaagctggagaggtataattgatttgccggtaaggaacgtgcggtacctatctcatgatggctttcctcgataggattgagcgtgtagacgagtccgatccggccaccaatcgtattcaatcccgcattcggaagatgagtatttccgtttgagtagtgcgttaaatccgccccgacaagcaggttgcaataacgggatagtttcgcgttgaggaaaaagcccagattgatataggcattgatcttagaaccgatgatcttattgcggtaattattgttatcatcatacggatgccaaccaaatgaggctccgaaattccactcataatcgaaggatagccgggaagaaattttggcgatgcgggagctttggaaaacatacgccgcccaaggattaccaacttcctgccggtttccaaaggtattataagagacgcctattccttggtaagtgtgcggataaagctggccctccttagagttaggattcagttggaatccgtatttcaaatggaatgaagccgccttacgtaaagtaagcccgtttccatagccgtcatctttgaggaatttactagtaggggcgacatacgagggacgtacgtcgaatcctattttgtggataatggatttatcatcatcttgagcttttaccgtacaggtccatatcatcatgaccgctatgtaaaagcttatcatcttgctttttatcatacttcaatacgtttgtctgatcaccaacactgcgctttgtctttcaactcgggtatcttgttcttatcgaatacagggcttttaatacccgctttcttttgggctacgtaatcctgtaataataggaacgcttgacggctcaacaatgagatcgcgatcaaattgcagatcgtcatcagtcccatggtcacgtccgctaggctccaagccaagtctaaactagccaacgcaccgaacatgaccattccaccgactaatatacgataaataaataagacacttctcttggacgtgataaaacgaatattcgcttctccgtaatagtaattaccgataatactactgaacgcgaataaaaggatcgctaaagcgacaaacgtactaccgatgctacccacctcgttactcaaagcttgttgcgtgagctggactccattgatggagccgtctaatggcgctccgctaaacaagatgatgaacgccgtgcaggtacagataatcagcgtgtcggtaaatacgcctaatgcttggatcaatccttgtttgactggatgggagacatgcgccgtagccgctacattcggtgccgatcccataccggcctcattactgaatagacctcgtttaatcccttgcatcaacgccgctccgacactaccgcctatcgcctgttcccaaccaaaagcgtttgacagaatggtttctataacagcgggtaggcgggtaatattaaacagtacgattcccaacgccaatgctatatatcctaatgccatgaccggtacgacaatactgcttactcttgcgatgcgctgaatacctccgaatatgacgattaacgtaagtaccgtaagaatcgctccgatccaagcatgatcgatgccaaaagcgccttcccaagctgcgcagatcgtattgctttgtacggaattaaaggcaaagccaaaggttatcgaaatcaatacggcaaataatacccccatccatcgtaaccccaaaccatgtagcatatagtaagcgggaccgccaatgaacgagtctttccctttttctttatataattgagctaacgtagactccacgaatgcgctggaagaaccaagtaaagcgatcagccacatccagaatacggatccgggtccgccgatcgctacggctgtcgctacaccggctaggtttccggtccctacacggctggctaaagatacggcgaaggcttggaaagaggagatatgcttttcccctttttctcctttcccggcagaatcgcctaataatcggatcatctcgccaatcatgcggaattgcacgaacctactttttatcgtaaaccatacggcgcatcccaataacatgataataaggatgtatgaccataatatatcgttgactccgttgatccaattattcaatagctccatgatttataatctgttgtttggttacaaagatacgtatctacgaagcaaattcatcgaaatattatttttttatcattttcttgtaacgttttccaaacggctgtcgtcttatagttagaaacaaatgataagcgggaaaggccaccctgctatattcggaaaaaatacgataaaaatgaaacggatgatgatttggatcatactgctaggcggtatggtacagggagcttttgctcagaacttggagataaagggaatggtgcgggacgctcgcaacaaagaaatcttggaatttgcaaatgtggtattgcaaacaatggactcttcttttgtagcgggtacgactacggatatgaaggggcattttttattaaataagattaaaaaagggagttatattctatctgtctctagtctaggctttaagacggagtatatttccttggaaggcttgtccaagaatatttctttgggagaaatatccttaaatgatgatgcggtatccttagacggggtgacggttagcgcctctgcccagacgagccatgccgataaaaaagtggtcttcccatcggatcgccagatgaaggcttcgggaaacggtatggatttgttgcagcagatgatgctaccgagagtgcaggtggatttgttgaacaacgagatcaaggccacgggaaatggggtagtccaagtgcgtatcaatggcgtgaaggtggaacaggatgagatcaaggccttgaatccctcggatatcatccgtatagaatatcatgataacccgggcttacgttacggcaatgccgatatcgtgctggattatattgttcgccggccggatacgggaggtagttttggtctggacatggcgcaaggtatcaattccatgtggggtgaacataatgcttggggaaagatcaatcataagaactcggaatggggcgcttcttatcggatcggtcctcgtgatttctatggaatgaaacggaataacgaggaagagttccatttagcgaatggaacgaccttgaaccgtgtggaaataggcgaaccttcgcgcgctcgtttgttcatgcataacctgaatgtgaactatagctatcaaaagccggataagtatatgtttaacgccacgttccgctaccggaataatcatcaaccgcattgggattatcaaggagtcttgatgaataaggcgaatccggaggataaagtggatatgatcgatctatcgggatcagcctatcaagctcctgcgctggatttatattaccaacgggatttgaagcataaccagaccttggtgtttaacgtggtagggacttataaccaaacgaaatcgacccgtatctatcaagagagtaaacatgaacaattgttgactgatgtaaataatgtggtggatggtgataaatactcgattatcggcgaggctatctatgagaagaaattaacgaatggtaatcggttgagcggcggtttacgccataaccaatctttctcggataacagttatatcaatgggcataactataagacgcatatggaacagatggagagttccgtatatgcggagttcaagggaaaggtgaaaaaactggattactcgttgggtgtgaccgtgaatcgctcgtcttatagtcaacggggtgaggatgcggattatgaacgttatacggtgagtccccggttgaccttgttttatgctttgcccggggagtcttccatccgtttgaaatcaacgatggggaatgtgactccttctttgggtgagttgagtgcgattgaccaagtgatcgattccttgcaaatacagcggggtaatcccaacctgaagtcttatatgagttattatacggaattgaattacgagtttcgcaaaggtctgttttacgtgaatgccttgggcgcttatgagtatcagccggacgctatcatggacgagaaatatctggaaggaaataagatcatccagacttgggataatcagaaaaactggcaacgggttgtcgcgtctgccaatttgcgggtcggtccgatcaaggacatcttgcaattttctgtcaatggtggtatgaaccattatatgagtaacggtaatacctacacgcatcgatatacgaactggtggtgcgaggcgaatgtttccgctacatggaagaaatggtcgctttggtatatggtaatgacaaattggaactggtttaagggcgagacgatgagtgggggtgagaatatccaaggaattcaactcggttatcggcataaggacttgatggttggcctgcgtgtcatcaatccgtttacggataattataagcaggagacggagaactggaaccaatacgcctctttccgccgttcaaattatatcaaggaaagttctcgcttattcatcgcgacgatctcctataatttctccttcggccgtaagttcagcgccggccagaagaaggtgaataacgctgataatgactccggtgtgatgagtaccggtaagtaagggaatattttatatctttgaggaaaaataaaatgagatatgaaagcgattaatccgaatgagatcaaagacaactttatcgagttgattggtaaggagtggatgctggtaagcgccggtgataaggagaagtttaatatgatgactgccagttggggcggcgtgggagtgttatggaaccgtccggtggtgtttgcctttattcgtccggagcgttatacccgtgagtttatcgatgctaggaatgaattcacgattactttcctaggaccggagcaccggaaagcccatagcatttgtggctctaaatccggacgggagattgataaagtggccgctacggggttgacgccgctctttacggaggccggcaacccggtattcgaggaagctcgccttacgttggaatgcaaagtggtctataagtccgagatcgaggaggccaagtttttagatcctaccgttttccctcgttggtatgatgagaagaacggtaatgcgcatatcgtttacattgccgagatcttgaatgcttgggagaaataatatcacccaagcagttctttcatcatttgctccgtatgcgtgaggaaatatttagtgagttggtaatgctcggtttcctcatacggggtgacatgcgctccggtatcatcgatggcgtaaatgtccgcgttcggataagccatcaggatcggggaatgcgtggagataatcagttggcaaccgttattcaccagttcgtggatacgcactaaaagggccagctgccgttgtggggagagtgcggcttccggttcgtctaatataaataatgtattgcggctggcataattcagaaaagcgctgagaaagctctcgccgtgcgattgctccaataaactcctgccaccgtaagctttataggcgtagatccggctgtacttacgtaattccagttgagcttgtctatccaattcggccgcatggttaaaaaaggattctgcccggaagaagaaatgcttttccggtttttgggtctcgatcagcttaatatgctcgggtaagacattggcgtaaatcttgtatgcctcggttccgtcatatagcatacccggttcttcctcatccctttcctcatatttactcatcatcgcttccagcagggtggattttcccgccccgttctccccgacaaggaaagtgaccggcttgcggaaaatgaacgattccgtgaaacgtactgccggagctttataaggatactttagctcctcgggatcgccggctaccaagtccggatccagtaattttacttgcttcagatagatcatacagaatatgttttgttacaaacatagtgaaaatatcaatggaatgaaagataatatcgtaatcgttgttgttcgtgctccggaaactcttccaatagggataaatcctcccaaccttgtaatttcctttttttccggatcattttttcgatgatcctagcttgtttataactgacatatgggtgactggctagttttttagctgacagttggttgacaaatagatgactaataactgacgggtccacggaaaaccacgatttcatcgcttcataacgatcctcgtcaataccatatacttctcctagttgttctacggaataaaatcctcctaataagtccctgtatttaatgatccgcttggcaaaaacgctaccaattcccggaaccattttaagggcggtggtatcagccgagtttaattcgacaaccgttccttgcggccatttttctgctttgggataagagggaaaatggggctttgattcccttcggatgcgtttggatttcccttcggaagggattttagtttcgttcgaatgggattctttttctttccgaatggaatttgaaggtgttttattcgaatagatctgtgaggaatcttgtttgattccggtgtttaccaatggaactgtttgaaattgggaacggtagaaatccgtcccgataattgcgatccatgccatcgctattaaggaaaggagtagggtaagagcctgcctttcccccttggagaaataaagtaaatcatgccatttcatagtcttatgttttgatttgtggaacttccaccgacaaaggtagaagttccgtttctattgacaaggaattctcggtattatttaccggtgatccatttcaagatacctaattcgttcaagaatacgataccgatggcgattggggccacgtatttcataaagaatacgtaagcgccgaaaagacggaacttaagagtcccctcattggtcaactcggctttcaatacttttttatcgacacgtgtacctacgaaaatacaagtgagcatacctcccagcggtagcatgatcttggcggtcaagtaatccagcgcgtcgaaaaaggccaagcctccaaccgtgaatcctttcatcaccccgaatgagagagaactgaaaatacctaagaaaaatacccctaaggaaacgatcaaagccgctttcttgcgtgtcatgtggaactcctcaagaacgtaggccgtagctacctcatgtaaagagatcgtggaagtcagtgctgccatcgctagcaagatataaaaaatacaggaccacaagccactcagcggtaattgcccaaatacgttcggtaacgtgataaacacgagttccgcaccagcggaaggggtgatgccgaaactgaataccgccgggaatatcatgatacctgccaatacggcgacaagcgtattaatgattgtcacctgccaagcggtggcctgcatattcgtatctttcccgaagtaagaggagtaagtgatcaggcagcccatacccaaactcaaagagaagaaagcctgtcctagtgcgctcaagaccactgaggaagtcaatttgctaaagtctggcttgaaaaggaaaagcaatccggcctcagcgttcggtaaggtcacggaacgtacgcacatgatcagcaagatcaagaataaaagcggcatcatgatcttagaggcccgttcgatacctttttctacacccgagacaatcacgaagtgagttaacccgataaaagcgcccatccaaaagatcggacggaagacattggaggcgaaatcctgaaaatcggccgtatagtctatatccggctgtccatacaaacggccacttagcgtttgccaaacatattcaagcgtccaaccggagacaaccgagtaataacttaatatcaaaaatgcggccaagatcccgttgtacccgatccagcaccattttgttccgggagccatcttcttgaaagaacccaccgtattactacgggaataccggccaatgaaaaactcggttaccatcaccggaatgcccaagaatatcatgaaaagtatgtagaccagtaggaaggccgcacctccgttcgctcccagcatatacgggaagcgccatacgcttcccaatccgacggcgcatcctacggtagctagtactacgcccaatttactaccgaatgtgactcgattgtttgccatattatttattgttgcttttatgcttttaattgttacctattttcttattttcgggagcaaaagtaataatttgaattaatttgttcgtgtaaagtataaataatttagtgaaaggagtatgaaacgaggacgtaagaaaaagttagcaatctcattgatggattatatgggaaaacgaagagacatgaaacggcagttaaagaaagaagggacagctgagttgtatgaggtggccgtaaggcattttttaagattcgtgaagaacccggggttctgtttggccgatttgaatcgtgcgttggtgatagatttcatcacgtatcttcagggaaaaggattagctactaatacggtaaatacgtatatcagtagtttgcgggcgctttataatatggcttgccaagagtcgttggttcctgcgtcatattatccgtttgagaatttgaaactccggcgtgcgatgacggcgaggcgtgcgattcccgcatctttgttccagcaaatcgctcagatcaaggtggcggatgacccgcaagtggaattatcgatagatctttccctattcagttttatggcttgcgggatgccttttgtggatatagcgtacttgacgaggcagaatatccgggggaatgagttggtatatcaccgtcataagacaggacgtatgatccggttggagataaccagtagtatgttgcaattgatccggaaatatgcggatcggcagcgagcgaccggatcgtcgtatttgttcccgattcttccgcccgggaatccggaccatttgaggtataagcgtagcttggctcagcataatgcccggctgaaacggattgggcaaactttacggttaccgaatccgtttacgtcgtatgttgttcgccatagctgggcatcagaagctttacgttgcgatatgccgatggccttgatcagccaggcgttggggcactcgtcggagaaaacgactcgtttttatctggaagaattggatatatcacgtttggctcatgcgaacatgaaggtgataggctctgtaaatcggattttagagaaaaggatggatggtttgtgaacttatttatggaataaggagttttagcgttaaaatagtaactttctccctattagttcacaaaaatacataataaatattttattatcacaacttttctgcattaaaattgtcaagttcttttcaccaaataaggaatttaggggaagctatgtctttaaaatgaaccatattcacctttattgattcactctctcaactaaagaggaatttctatactctacaaattcctcctgaatatcaaaaacaaataatacaataagctcgtttggataggcctatatgtaagccattgattggcagctgtatagaaacaccataatatttattggatttcatgtacgtgttttccaaaaaacatgtacgtcttttcaggaaaacatgtacatgtttttctgaaacgttccgtgtggtctattgatatactatataaacgacaataaaatgttgtttaacgtttattctccgctgacgtttttgaaacgctaaaccttattccataaataagtccacgggccattcttgccgttagttgattttaggaagttgggtcttgaggggcagaagggtgagaagatataagattaacaaccataatgaataagaaagaatgaagaagacgattttcatgctattcttgttggcagtcccgtttctttcgagagcgcagggggtaccggccgaagggaaaggctccatgattgggatcaagagtaatattccttattgggctactgccacgtttaatttgggggctgaagtttatctcgcccgtcattggacgcttgagttggaggcaggcttgaatccgttcagcggcaagaacgatgatgggagttatggccgttcactgaagcatttgcgtctgcacccggagttgaggtattggttttgcgagacgtttaacggtcatttcctcggcgtgcatactccgtacctattatataatgtagccgatatcaaatggctgggtacagagggcgagcgtcaccagggatggggcgcgggagccggtatcagttatggatactcgtggctgctgtctcgccattggaacttggaggccacggtgggcgtgggctatctgtacttgaagtcggacaagtatccctgcgcgaattgcggtcgcaagcaagaagggatcaagaagcattacttcgggcctacgcaggcggcgatcaatctgatttaccaattttaaatcgatggaggactgaaaaatgaagaatctacaaggatggatgatacttgggatcgcctgtttggccggttgtgtgggtactacgattcccgtacaggcgcagcagacggctaccgccatcgtcgtgaaggagcggttggtggagcatgtgggcgatcgcttgataattgatatgaaactagcgctggatgagttgtcgctatcggccaaccggagtttggtctgtacgccgctgatcgagcggggcgatagcgtaagggctttgccttccgtgatcgtgaacgggcgtaaccgccagatccagtacgaccggtctgggcgcgatgcgacggcgaacggagagtttgtcttacgccgtcacaatgggaaggagcagacgttcgattaccatgcctccattcctttcgccaagtggatggagcgttcggaggtgtcgctggtagccgatttttgcggttgcggttgggaggcgttgagtaatgacaagtcgccgcttttcccgatccgaattgcggagcctgtggtattgcggccgcttttggcctacgtcacgccggaggcggagcgtgtgaaagagcgtgtgaaggaaggaagcgccttcctcgacttcccggtaaaccgcacggagatatatcctgagtatcgcgacaatccctcggagctgcgcaagatccttgagaccgtgtcgtcagtgaaggaggatccttacgctaccatcacggaggtatatatcaagggtttcgcatcgccggaaggtacctataaacataacacgtatttggccgagcatcgcgccaaggcgttgatcgaatacgtgaaaggcctttatcactttgagcaggcccgtttcacggtggatttcgagccggaggactgggccggattggagaaacgggtggagaactcctcgcttgcggacaaggaggagctgctggccatcattcgtgcggacgagccgaaggattacgaccgtcgcgaggcgaagctgaaggcgttgaacgggggggcctcgtatcgggtactcttgcgtgatatttatcccgccttgcgtcattcggattacgcggtgcgctacacgatccgttcgtttacggtagaggaggcccgtgagctgatctattcggaccctaggcagttgagtctaaacgagatgtttcaggtggcgcagacgatggaaccgggtagcgacgcttaccgcgaggtcttcgagattgccgtgcgtatgtatccggaggatccggtgtcgaatctgaacgccgcccttacggcgatcgacgcaggtcgcttggaatcggcccgccgttatttggcgaagacttccgattctgcggagcgtaccttggcggaggcggccatcgccatgctggagaaccgcttggacgaagcggaggctctgctgggcaagctgtccggcgatccttccgtagcctcgcaggtggaggagaacttgaggcagatcgcagagaaacggcaagagtgaaaataggataagataacagacaaaaattttaatattatgaaaaagaaaaaatggtacgtagcgatggcaacggcgcttttattggcggccggttgttccgatgatctcgacaacggaaaaaataacaccggggcggaagaggatggcgagaaggtctatatgacggtgaacgtctctacggtttcgcaaggaacgctaacgaaagcagatcctactccttctaatcctaatcaggggggagccggttggggcgaggatggtaatggttctcttggtgagctttccggctctaaggagggtatggtatatgatgttaatatattcttggtgccaacagatgaagagtctttgggggatggcaatcagctggagttactaaatactgacaatggtagtagtatacagatcgcaggccaaggttattattcgaatctggaaggtattgatgcgagtttaggtggaactgagcctggtcatggtgacggaaaggttacgatgaaagtaaccatgaagaatcctctgacacaagataagagcaattatcaggtatttgccgttattaatgcgggaggaaggttgactggtattagtacgttggcagacttgcgcgatagagttgccgcaaacgatagggcattgtggactcctgctagtaatatggcggattaccatcattttgtaatgtctacacataagatgataagtggtgctattccttctaacggcagttctatcgttgaactttctgctgcgaatatggatgagacaaatccggctcagacaacggtgttcgtagaacgtttagccgctcgtattgatttggcatactcctcgaatttagatctgactaatataccgggaacttctcctgtaaagaataagggcacgttcacgttgaagaggtataaggtagtgaatcagtggaagggcgaaagttatctttttaagcaagtttctcctacggtacagtataactatggtgctaatgcggtattgccggcagatggtaccaacgatcctgctcgatatttaggtgatgagaaatggatatggaagaataatgatactggtgccggattgttcaattatgtgttagatccgaagatccgggaaaagaaattgccagaaggggaaagttcttcttgggatcaatttaaagattcatatgtcaattattttaatccgagcaattcaactgatttgaataacttggataagatggtgtctatgcctacttccggattaagctatacacaggaagtaagtggtgatagtcggacatattacccggttgtttataccaaggaaaatacgttggatctgaactcgcaggtacatggctatactactggtgtaatcttcgagtctgaatttactccgagtaacgactttaaggtgagttcctatgaaaatggggagatcaagtctgtgaatttgcctaatggtgataaaacgtttctttctgcggctcattataatagtaatggttctgtgtcacgtcttgtttataaagatgtgaagagcgttgctgcccgtgcgttcaatttggaaaacgacaagaaaaatttattgaaaggctttatggatggttgggacgatataactgcggatgtcaatgctgtgaagaaggcggttcaaggtatgtcttcccaaaatggattagaaagtgcgtttaaggaatatttggatgggattctaactggtacaaccactcttgatgagactataaaacagaaattgacttatgcggcttttagagatcaagcttcgcatcttccttctaattttactcctgtatctcaattcagctcagagcaaatcggcaatttataccaatactataatgtttccctatacaaaagcggaagaagctatcacaagttctggatccgtcatgatgataacggaaacgatggtctgatgggcgtgatggaattctgtatcgtacgcaataacgtgtaccagttgtatgtgaaaggtattcgtggcttgggcgatccgttaccttataccccgggtaaggatgatcccggtacgccggatgagagtgatgatgtcactatcgacgtgactatctacgtgaaggattgggtaaaacgtacgaacaaagacattatcctataactttacccttcgggggattcttacgatgggcattgtaagcactttatgctgcccatccaagcaaccttacgatgcccatcataagaaccttataatgggcatcatggtttacctccatttccggtagtacgggcggaggattactgtgtatcttaataaaatgattatgaaccgtttatttcatacctgcaaacagttgattggcatagccgccttgtccgtggggctatacgcttgcgattggatacacgacgactcgctgccgctttgcgagttccgcctgtatttcaagtacgactataatatgaaattcgccgacgctttccagcatgaggtagacttcgttacgctcttcttctgcgaccaagaagggaacttcctcttccagcggcggatcgagaagagcgagctggacgagcggaactccatcgccctcgacatggagccgggtacctatcaggtagtcacttgggccgggctggacaagggcagttacgcatggaacgatcctgccgaggcgtcgcaggctgtcgagagggcgcaagacgtcaaggtacgtaccttgcgtgaggacgatacgacacaacccaacgaactgcgcccgctttggcatagcctcgataccttcaccgtgacgcgcgacatgcccgaggccgacaccatctcactcgccaagaataccaacaagctgcgtgtcgtgctgcaaaacgtgatgggtgaggacatggatgtgaataacttctccttccggatcgtggctgacaacgggtatatggattacgacaattccctgctgcaagatcccaccatccactacctgccttattatacggagaacgtggagttgggagccgacccgacccccggcgctaccgtaggcgggcaatacgtggccgtggccgagatgaacaccatgcgcctgatggcgggccgtaactaccgcctcatcatccgtcatcacggatgggagaaggatgtgctgaacgtgaacctcaacgattacctccttctcaccaagatggaggggcaccgtatctccccgcaggagtatctggaccggcaggacgagtattctatcatcttcttccttacaccgaaggtatgccccgattgtccggataagcctacgcctccggatccttcgggacctgacaatcctgataatcctgacaatcctgataacccggataatcccgatggtcccgatccggaagaccctacgatcgtggggtacgcctgcttcaagatacaggtgaaggattgggtgattcgtatcaacgatggcatattgtaaacagagatttattaaatatcgctaatgatgagacgctataccatatataaccgattgacggcggtcgccgctggtctttgcctctgttggctttttatggcttgtggtgaagatcgggggggcgatctcccggatgacgacccgaaccattgtgttgtaactatcactttgcggacatcccgttcggtacgcccgccgcagacgaaggccggagggatgatgacgaaggcggatgaaactactgagacggatttctgggcaaaagatgaagaatacgagcgagacatcacgaactggctggtggtggcctatgatgagaatgcggattttgccggatatatatccggcaaagatggaacatggactccggatatcagtaatgaggattctcgtactacggtggagatgaaactaccctttggcacataccatttttatgcgttcgccaatttacaatcgttggaagacggtacatcgttgtatcaaaaaattaccgaagcccattccttggcggaactgtcggaggtgaagatattggactcgggaacgagtattgatacaaggaatgaggagaaaaaaggtaaattcggaggcgaggaagcgtctcgaaagcgtattcctatgagcagctacgcccaaaagcatacggtattgcccgctccggcagagaacaaattcgagattcccttgatccgcatgatcggcaaggtgcaagtggagataaccaataacttagataaatccataaccgtaaaccaattggacatcatgaacctccgcaagggaagcctgccgatctggctcttgccttggggaaatgagaattatttggagtttaaggataacaaggacttggaagagcctttggctccatcttttccgaaagatgcgaatcctcctgtagtaagtctagaggatctttatactgaatctatcaaacccggtgataatgaaaaagaaatacaagccaaacatgtggacggcgagaacggtagtaaacgagcttatattcgctacattcctgagaccaatgcggccgtcggagagaacggcggtggcatccacctcggtgtagagatcgaaggccgccctcgtacggagcacctcacgggcttcgacttcgtacgccgcaatgacctgctggtcatccctgtcttgataaccaacatcacgacgaaattggaagtagccgagcaacgtctccccatcggggtctacccgaccgccttgttctatggcgagaagacgggcgtgcagatactgacgcctgttgagcataccctgcaagccgccggtgacttgtcgatccgtttcgagatatctagcatagaaggcgtgacaggagatttcacgatcaaaggtctcccgcaggagggaacggttacggaaacagcgaaaatcagttcgatccaagtaaaaagcgacgagaaacgtctcattacggccgtaaacggagaggattgtgacaagaaacagcgtttctaccttcccgaggcttcgatcaaggaaggaaagaaaggttccttcacgatccgcactcgggaactgggtggaaacgtggatgctacagtcatcctcacgctcattataaactattatgtgggtcaggagaagcaagagatgcaaatcccctacaccatcaagatcagaaactacaaataacaaccataatataacaacaataaactaaaaaaggaggacctgacggatgaaaccatcaatcaacctacgatataaatccttgttattaacttgcttgttaattttttccgctggtgtggctgtgccggcgtgggggcagacgtacacgatcaattataagaatggttcaccccaaaccggtattaccgaacgtgtggatacggtgtatgtggcagatggggaagagagggagttgtttattcctgagttgaggaataatgatggcttttataatgcgaactatcggtggtatgtacgttggtatcagcttaatgaaggtaatttaagttgcgaaaatataaaaggtaaggctataaatcctaagttagatggttcttttgtacagggtggtgccttacaggatcttataaatctctatccaagctcgttgagagacgcaggtacttctttatttttttataaagacttttataagatagaaggtacaactgctataaatagctctgtccctctcggagcctctacggttgaatattcagcggtgaatgtaaaagaagatcttgttgtttgtgatgtgagtttaaataacaattataaggtggatgggactacattcactgaacctactttgtccatacgttataaatttgtgattcgtccggcaagcgaaattgcgaatcgcataaaagattctaaagcggatgaaaccactccttttatggatgaaaccatatatgtcccgcaaaataatggaacgattaatatacaattgggtaggatcgctaataattatgcgtggtatgacggagatcaaatagtacagggagaaacttatcaatataagaaagacaatggcgaatggaaagatttgggtaatcgctggacacagattataaataatttgataacggttggaacacaacctgtaaaattagaaattcgggcggtgggtaaagataagacgaaagcgagtcctctgttggtgcgatataatcttatctctggtgatcatggtttcatgttacaggaaaagcaagaaaaagattctgacccaaggcgtaatccggataactatccggagttttatgaaagaataggatatataaattttgaccggaatgattcgatatctgtagacgatttgaactctgttaataatatggcaaagattggtttttctgataataaagaggataaaggtaaatggttggatccggagatcacgggatatgctccatttaattatcaaattcaaccaaataaggataatcggattcagaccttacaaaaccaatatggtttgtttcgaacagcggatgtggaaaaagtatcaacgaataatgaaaaggttgagggaaagacttatttttggtttgcaagtgcccaaagtaagcccaaagtggcaatctatgaccggacttattacaatacggggaaaaaatcattgggatatttcttttatgtggatgcggccaatttgccgggacgtttggtgaaaattccgttggatggtaatatctgtgcgcatacgggtattttagtgaacttttgggtgaatgatatgacgacatggaaagatactcaagccgaaggaaaacctctacctcctaatgtaaacatgaattttatcggattaaaagcagatggtacagaagttgttttacatcgttttacttcaggggatgcactgactgattatacctcgacttcggaagggcggccggctaataacaatattggtaaatggcagcaattaatgtactcattttccttgtcacaatcgcttgatgattatgtaggatattatctggaggtacaaaacaatacagctcattcatatggtgcggactacgccatcgatggtctgcgtatttatcgctccataccgcaaatcgacgtaaagcgagtagacgtgtgttcttctgccagcctgaccgttgccacggattacgaacttctgctcaagaatatgggttggagcattaatccggatgtattgtccgatctgaatatggggaatagcataacggaagattcaaagcatatatggaaataccgctatggtttgatgggtggagatccaaggaaaagaaatgagaatcttaataaaacgatcggaaatgtttatattggagctaccgataaaaaggaaaatggggatataaagaagcctgaagattggattacattaaatacggatttgaaggattatagtaatgagcgctataacaaccgaagcaaggtgtatcgtattatcgttccgactaaagaagggttgaagcatcaaggatttgaggatctgacaaatcatgaaactgcgatgcgacgacaaattgtcgtaaacctgcgtatgatcaatgatttcttatatgatgccgctgagcataaaatttggcaaaaagacatactagatcatgcccaaaaaacaaatggggataaattcccggaagaagagtatattgcgtacttgaaacaaaatttgagtgtactctgtggcaaatcggattcagagtgggactataagattccggaaccgaaagacctatctaaccagatagatagaataatggaggggaatgacaataatctgtacgaagaactgatacgggccgtttgttcggtaatgggtatttctcgtcctcgtatgccttggtgggatgaaggaaatagcaataccatccatttgagtgccattgatgtggacaagactgagttgaaatataaaggggagcaaaatttcggaagtaaagagaatgccgcctccggtaggtatgatgtggtaatctttagtgcggccacgacagttactagtgatgaaatcgtggatttcccgaatgcccatgcgggagatagtttcaacgatccttgcttgctgactacccctttcaccgtactcccttccttcacggtcgtggcaaagaccaagacagatttgccggagggcatgatcgcttgcgagggacggatcagccagattgaggaggcaaccatgtgggttgaaagatatgataaggacaacaacttgatgactggagagacagataagtttgtagatagatataagggttattcatatacgttcgactggttcttgggagactcgctggaatttgctgcgttctatgatgaatatggattctctttagaagagatattgaagtcttatagaaatacccttcccgatgccgagaaagctttgtctttccccgcgaaaaatttgattgagtattatgaaaaattagacgcatataaagataagcctgcgcttattgcgaaattgaagacattgcttttaggtgatgtagatacagagccgaaattggtgattggcgggaatttgggatatgcggagtttcgttgggtaaaaaaagtggtagcgattccttatctaccggagagtattcccgagaaggacagactttggcttttctgcgatagacctcaagaacgatcactgaaagccgctcccgccccgaaactacttgttggtttcccggacgtgaagtatccggaaggaatggagcattatcccaatgttcccctgcgtattggcttgccgaatatcatggagaaaagcataaccaatattcctatccaaagcaatggcctaaagatgggtatgacagaatccaatcaattaggtctgcccgaaagcaatactacggatatcttcttgcggcaaggggctacttatacaaaggtgggtaatttgacaaagttgtctgcgaaagctaaaagtaaaaatgaggcaggtggaactgactatggcggtggattattctccatgacttttgacgataaagcttatacaaattttgacgaaggccagatttatgccctctatatcccattcggtgaatataaggacgaagctttcgtaaaaggctcttgcgaaggatacgctaccttacttatcaagatcgtgccggaatatctgacttggaagggtacgaacaccggtgaggacgctgaggcatggtataatgacgcaaactggcatcagtctacgaaaggggaattgtacatagatccaaacggagaagataaaacagacgccaacggcaatgatgcagacttgaccgccgccttcgccccgcttcatttcacccgtatcacgatcccggaaaagcagatgctggaattggaaggcttggagacgaaagatcatttgttacagattcccgaagcgaactcatcaaaggctaccgagtatatccaatatgatatggcggtagacaaagacggagataatacgatcgtaaccccgtactatataaataaggtaaaggctatctatttcaaacccgaggcgcagttacgccgtcagcaattcctgacgtacgacactgcccatgtggaattcgagatgacacctgatgcgaaatattggatggcatcgcccctgcaaagcgtattcgccggcgatatgtacaccgtgaagaacacgggccgtcagaacacctatgctttcgccgatatcacctacagcacggctgacaacgaccgccaagccccagccttctaccagaaagcttgggacaaggcgatcacgatgtacgtgccgaagagcgaagcagatcaaatagtttcttttccggagaatggtttggatacaactcattacgaggtagtccaatccaactggagccgtgaatataacgatgtgaatgtgccctacgctttaggaaagggattctatgccagcgtagaaaagaagaatgcgaccggcttaggtgagaaagtattggtacgcctgccgaaagcggatgactcctacaaatatgaaccgtggaaaccggatacgaaaagcgctacattgagagccgccatgaccaaagccccgactttagcaaatcggatcaatgctggtaaactggcagataacaagtcgatcaaggtggtattgacagatgtgaatggaacggaagattggtggaatacggataatggaaccgtccgtgttattgctgatggtgacggcaagcacttcctgttgggtaatccttatatgtatccgttggatatcgttcgtttcttgaaagagaatgaggctatcttagagcaaaaatattggacattggatgtgaaggaggggcttgttgtcggtacacctgatgtagcatgggaaggtggaaatgttactgatgctacatccggagccgttatcgcctccatgcaagccttcttcgtagagctgaaagatgcggctcaaacgaaagcggaaggtacggcaaccggtaccgatctgaaggtggttcatttcgatccctccatgatgcaaggagagtcggagaaggtctcttcttccttacgtaccgctacggccaaaaacccggtattgaggctgacagcagagcgggatgcatatcgtagcacggccttgttgatgcggcaggatgatgccgcgaatagctatgaggcagataaggatgccgtaatcttgctggatacggaactggaggagatcccgcaggtgtacactatcgccgggactcgtgccgtgggtgtgaacgtagtacgacggatcgaccaagtgccccttggcgtatatgccggcgagggtaagggggaggttacactgacgatagagggtatcggcgattgggcggagacgctttacctgtacgatgccgtgacccgtaaaagtacggagttgtcggacaatacgtataccttgcgtttggacggcagcagccatggacgttacttcctaagtgcgggctcgcctaccggtaatgagggggtggacaacgtagaatctatctctgtctattccgccgtatcgggtaggatagtggccagtgctagcgaggcgttgaagcggatacaggtgtttacgccgatgggtcgtttggtacgtaccttatatcccgcccgtccgacttatacgttcgatctcccggcaggcatctacattatccgcacggagatcgcctacgaccaaaagacggtgaaactacgggtattgtaaataaacccccttgttgttagttcgtttctaccactccatccttgatatgaatcacccgatccgtgtttgtggccagctgttcgtcatgcgtcacgatgacgaacgtctggttcatctggtctcttaactcgaaaaagagggcgtgcaattcttccttgttcttggtatcgaggcttcccgaaggttcgtcggcgaggataaccgccgggttattgataagcgcacgggctaccgctacccgttgcttttctccgccggatagctcggcgggcttgtgtgccatacgatcggagagtttcaagaagtccagcatctctttcgcccgcttctcggctatggccgatttctccttggcgatcagggctgggatcatcacgttttccaaggccgtgaactccggcaataattgatggaactggaagacgaagccgatattccggttgcggaaagccgccaattccttatcgcccaatcgtcttgtctccgtgccattgataaccagtcgcccgctatccggtgcgtcgagcgtgccgatgatttgcaacaaggttgtcttacccgccccgctggggcctacgatagcgacaacctcgcccttgtttatcgtgaggtcgatgcctttcaatacttgtaaggcaccgaaacttttcgttattccttcggtttgtatcatatcaagtttcttaggacgtgcgaggcaaggaaacaaccgaacgttgccggcatataagagaccgttcccgtggtcgtacgtttacatgtttcgttttcaacttcgatcacggcgtccggatcggcgaactcggtggaaaatacgacgggaatccccttgcttacgcctagaggacgcaaccgtttccgcaccgctttcgcgagggcgcaattgattgtcttggagatatccgctatccgtaccaaggatgggtctaccttagcgcccgcccccatggaggacacgatggggatcttatggatatatgcttggtacatcaggtataccttgggacttagggaatcgatggcatctaccacgaaatcgagaggggccgataagagtacctcctccgtccgttcgtctcgcaggaattcattcaggacggttagttgcaactggggattgatatcgagcaaacgcttggccacgacctcggctttcggcatccctagggtggaatgaagggcgggcaattggcggttgatattactctcgtttaccgtatcggcgtctatgatcgtcatctttcctactccggcccgacaaatctgctcggcggcataagctcccacacctcctaggccaactaccaatacatggctacgggataagcgctccatacgctccgctccgaacaaaagttccgtccgtgtattccaattgtaactcatttatctatttttgagcacaaaagtaatcaattgttccggttcctccaatacttgcttttatccgaaagctttgtgtcttgttactgcacgggcgttgcagcgttactgtatgggcgttgcagtattactgcatcagccttgcagtaccaccgcaacccaggttgcagtggatgagttacgtcagatgggttgaatatgaaagactgatcctccgtcggaggccagcggaagggtgattttatccctgtaggtgatctcctcaacctcttttacgagtttgttcgagtctatattcatatcttcagcatctttatagatcgttatcttatatttcttgtccttatccaagaacttgaggtctacatcgatactgcgtgcttggctgttattgatcgtaccgacaaaccaatcctctccctttttgcgggcgatcgttacgtattcattgacggaagcgttcggaacgactgtttggtcccaagtcgtaggcacggctttcaggaactcgaatcccggttgtccctcgtaagcctccggcgtatcgcaaatcatgccgagatagctctctaataccacgtacatcgctaacatatggcagcgggtactcattacgtaagggttacgttcttggttcttgaacttatcccttggcaaagagcggaaacctcctaaatgataatcagtcgctcccgctaataaacgggtaaaaggcatatggatgtcatgatctgcgtcggtatccttatcccatttgcaatgctcgtaattaagcgtaccctcgcgggtgaactcgttgggataggtacggctcaatccagacggcttgcaagctccgtggaattgcacgaatagatgatgcttagccgccttcgccaagaactcttcttggatgcggatcatctcctgatcgtctcgatccatgaaatcgatcatcatgccggcgattccccatttctcgaattgggcgaaagcctcgtctatctttgcgtacagaggtttccagttggtccataaatggatacgtacgccttgactcttggcgtaatcgcaaatctcctgcatattgaggctcggaacgactttcaagatgtccgctttaggacccggagaaccgaatccggctccatcctcgtcataccaagcttgctcggcgttcccgtagatcgagtgataatccaatccgttacgggctacgaaatcaatgtaatatttattcgtggggaaattgtttccgccaaggaaagtcgtatccggaacgacatttccgttccaccacgtaaaagtagtcttacccggcttaatccaagacgtatcctctatcttacaaggctcattgagattcgtaaggatattggacgctatcaaggaaccgatttgatcactgatcatcaagacccgccaaggagattgatggggtagggatgcctctaccttgatacgctcttgtcccagtttaggtgatagtttcccgagaagagtcccgttttctttccataggtacataccggcgtaatcacgaaccgccgcctcggtaatcgccatataaacatggttcgggaaagagaatagggcgggcatatccatcaatcgtttattatccatgtcggcataatctgtgaccgtatatttaccttcgtgggaactttggtagttggggaggaataaagtagttacgttcggattcccttgtaggttgaaggtggttccctcgtcatacatgatatacgaatcccatcctttttgcttcggaaactcatagcggaaggcgataccgtcatcgaaagccctcaagaccagattaatcttgcgaaaaggctgaacggtttcctctagcgggatgattacctctttggaaaggctatgtatatgtttcgccttaccaacgatcaattcgtaggtctcttccttcgtactgaacacgggtttgttgatctttacattttccccgaacgccccattatcgaaagtcaacgttagcggagagtcttggatcagggtttgtttattaaacgctacgctgtataccgggctattcttatccaaaaccaaggagaacttgatctttccgtttggagaagacaatcgcacgcttttatttgcgtataaagagtgagcgcaaagtataaaaaatgccagaacgaggtagattgattcttttttcatggatgataattttataggccaaagatatacatatttattttgtacggtttaactgcttcaacaattccttaaggctgacggtctcattcttgaccaatggttttgcccaataggaaatactcaagatatagcccagcgtgataaataggaaaaacatggaatagcgcaacccgatcagatctccaagtcccccaatgatgaacggaatcaatgccccaccgaaaatacccgtacacaggataccggaaaaagccccatgatgcttatccacggagttaagggctaaggcgaatatcaccgagaacatgatcgagatcgagaagccgcaacaagcgaaagcgataatcgctacttgcgtaggaccgaagagcgctatcgctaaattaaggatcgctatcatcgagaagatacgtaacatcagctttgagtcgattaacttaacgatcaccaatcccaacaagcagccgatggacatcaatccccagaaccaagcaaccgtagtagccccggctccttccgggctgaccccatgatacatattcaagaaaaggctcatccaattcgccaatccttgctcggttcccacataagcgataatccctaagaaatagaatataacttgtttttgcctgagcaattccttataattctgtaccgttcccgccttctcatcttcctttaattctactttcgggaatttgacataagagataaccactaacatgatgacaaaaacaatcgtaaagataaaatagagcgagctccaaggtaagctctccggcgttatccctttgaggaaacggatgaagaagtcgtttgccgaatcctcaccggttaatttccgcataagtccggccaagacgaacgggctcatgaaagaagcggccccgaatacgatctgggccaatacctgattaaaggcatattttttctctccacccgcctcacgcatcaaaggcaatatgatcacctgtagcatcgccatgcccagaccgatagcgaaaagggaggtcaatacgatagagtaggtcgggaacatgacgaaaagccccgcacccaaaaacgccagactgaaagcgatcaataaggaaatctttcccccgaaacgctcgatgatcattcctgccgggatggacatgatgccatatgccaagaaaaacgagaacggcaagaatgcggccaatgtcaagctcagcccaaaactatcgataatcatcggtagcatagggcctaatatattggtaacaaaagaaatgacaaaccaaatacacaagatgaggagtacgatccaattattcttattcatgatagatagattcaatgattaaacaccaatgccgccgccccgaggcatccggccttatttcctaatcgggcaagttcgatagtcgtgaagtacgaggtttccttcatcacgaatttccagacctgttcccgtatattattaatgtagaaatctccggattccgaaatgcctccgccgataatcaccttttgcggagcgaaaatgttgataaggctcgctacgcctagggacagattccggaaatgatcctccatagcgagtacggcctctttctcttgagctttatagcgctctactatatattttccatcgatacgggaaggtatctcccgtccgttcttctccaataattgccgatataaggcgatcaacgcacttacggaagcgtgtgcctctaggcaaccggacgctccgcaagtacattgattcccattcagaccatgaataattaagtgcccaagttcggtgccccggttccggtagccgccataaagccggccgttcaagaacaaggcgccccctatgccggtacccaccgtcaagaaaacgatatcggagagacccttagccgctccatatatcacctcgcccaaccccataaggtttgcgtcgttgtcgatgaataccggtagattaaattccgctaacgcaagatccaattgttggttgtccagttcaggaagattattggcaaagagaaccacccccttatctactacggaaggtacacctatgccaattccgtaaatcccccaatcccgggaacgggcgtagtctgtcattttccgtacgatactttttatgatatcggataatgggcgtggattctcttttgattgtgtggtttccgacgattcgtaaagaatgtcgccattctggttcacaagagtatattttatgcttgttcctccaatgtctaatgcgatagcgtatttcatgataattgtaaaagcttaattagaactatgcgccgcttccctgtcgatcaggcaaatcacgttcgggtgcagccacaataaggaggccggcaactccgtcgagatcttctgttcaaggaaagcttgagtaatctcccttttctttatcccgttgataagaaggataatcaggcgtgactgaaagatattcgccatgcccaatgtcagtccgtatcccggtttctccgtatccccggcgatcatgggatgttgcaaggatttctgggacagatgagccacatggcaattcgtatgcaaggaaggagccggctcgttcaaggcgatatggccgttcatccctattcctaatatacaaatgtcgatagggcctttttgatccagtatctgttggatccgctcacattccgcctcagggttctccggatcgctttggaacgctatataccggtcttccgggatttgaagcggacctacgaaatagttccgtagatacgactcgcacgtacccgggtgatccatcgggattcctccccattcatcgagctttagtaccgtgaattgggagaataattccggttggcgaccggcttcctctaccagcaactcatacatccgggtaggagagcccccagtggcggcacaaagcgtaagtgccttgtgctgccctaactctgaggtaacaatctcttttgccttaaggcttaatgcctcataagattgacaaatctctattctcatacgattttagagctctttgattcggatattgcggaagcaaacaccataaccgtggtcttgcataccgatgtaacccggttgttttccgcattgtagcatcaagtcgtaagcttccgggcatttctccggactcgtgctgaacttgctgaacttactatgatccactaacgcgcgccataccggggtaccaaattggaactccagaattttcacgtcgttcatgtaatggatcacgcgttggttatagacaacgattctcgtcttgttccagtttccgtacggttttacgggttgtggatccggcataatcatgtcatatacggcaccggcctgacggttaccgtcgcaaccttcccatgcgtccggcatattctcgttgtcgagtaactgatattctgggctggagtaataaataggtgtaccctcaatttcttgcgctgtatagaagataccgctattaccggccttgtcgatcttccattcgatctcgaaaacgaaatttttgaacttcttgtcgtagatcaagtcgccgaagcccgtgtctgccttattgtcgctacctttataggtgatcgatccgtcttcaaccacccaaccttggggtacatcctgacggcaatagccgcgccatccgttcaaggtcttgccgtcgaacatggtgatccactcgcctcccgtagggataccgtcgctatcgagggcttgggtttgggcggtttgcgttccggcattgttcgtattgttattgttgccagaggtacatgatagagccgatgcgaataaggctacggccataatactgctataaatctttttcatctttgtatagttatttaagtaaattatctagttgtagagacggggtgtgccccgtctcatcccattgttgttcgcttttataacttgagatcttcccatccatcgcggtatttccgcttgatgaattggttcgcttgctcgaagttggtgatacgcatgttcgctccgtcccactggaaagtcttgtttcttcccggatagataaagccctcgcgttctccgtagatcgagtcgttatgtttcacttgttcccggatattatagctgcgtaagatcaggttacccatcaatacggtctccgtcaacggaccggcgtaaccttcgaatggtgattctacgtccgccttgtcgtatcctgcgatacaagagtcgatccacgcccagtaatgaccgttcgtgccgccttcgatacgtttgtatttatgaggaatgttcacgtccttgtcgaacagcggtttcttgttcgccttctgtccctttggccagaatctcgggtcggaaccgccccagccgcaagaagccatacctttcgtacctacgaatacggttgcgccttctacgtccatcatatccaagtctcccatcgtgcaggtcatgtctgcatccggatcgatctcctcgaaacgctccggcatgataccaccgtccatccaatagagattcaggtcgcttccgtctttcttcttgaatttataacggatcgagctggctaccgggcaactctcaggataataagcctcctcgaagataccggagtagacattggtcgtgctgcaagaaacctcagtcggataacctaattgaagcaatttgaatggagggccgatgatgtggcaacccatatctccaagagcgcctgtaccgaaacgccaccaaccacgccagttgaacggaacaagattatcgatataatccacatactcggcggtacctacccataagtcccaatttaatcccttgggaacctcaggcttctggctcggccaaggaataccttgcggccatacaggacggttggtccagcaatataccttctggatgtcacctaacagatctgcctcgaaccattcacgaagggtacgcataccgtcgcaagagttaccttggtcgcccatttgggtcacgaccttgtatttcttggcggcctcggtaaggatacgtgcctcgtaaatatcgtgcgcgatcggtttttgcagatatacgtgcttacccatccgcatagcgccgaaagcttggatcgcatggttatgatccggggtggagatacatacggcatcgaagttcttgccttccttgtcgtacatctcacggaagtcgttgaaatacttcgccttcgggtatttcttacgagcgtcggcagactgacggtcgtctacgtcgcacagacaggtgatcgctgcgtttttgtgcggcgtattcatcaagctacccaaatcggcggctcccataccgccacagcctattttcgcgatataaagcttatcgctgggagctacgtgtcctaatcccgctacggtaaaactgggcaggatcgtaagggcggcagcacctgtggctgccatcccaaggaattcccttctcgagattccagtcggacaggattgtttatttacctctttcataaatttgttcatattatgattaataattgaattggggtctaaagaattgatattaaaaacagactgatatgattagaatgccggatatcccgggttctgaaccaaattattattcttctgccaagccttgaacgggatcgggaagatcttacgatattccggagtctgtttcggcttcatatatctcggtttcagataagtcccgaagcggatcatatcttggcggcggacaaattcgaatgccaactcataaccacgctcgttatagatatcgtccaatgtcacgctcgtgtaattatgatcggaattgccgtaagccctttcccggatagcgtttaccagacgagtagcttcaccgagatccccgcccatacgaaccaaggcttccgctttcatcaggtatacatcggccagacggaagatcgcgatatcgttctccatattggtattttgcatgcctttctcatatacccacttattgatacgtgcgccgtcttcttggtgaacctcgccccacggggttaagttaccatccgcatcggttttctcagttcccggtaccacatttaagtcgatcgtatggatcaagtcatgtcctagggtcgttttcaaaatctctcccgtgctagggtcgatcatcgggccaatcaagaacgaaccttcgtaacgaggatcttccgtatcaaatgtgcggacaaaatccggctgggcgttgataccattccacataccgccggtgaaacctaatacatcgggatccagataatgcaatgtccaaagatgaatggagttaccccaagcatcagatgccttgtagcagatcgggaaaataatctctcgtgatacctcgttatgaacctcgaaattggttttccaattcggctcgatgatatattcgagtttcatgatctcgtcgcactgctccactacacctttccagttcggctcgccgatccattcctcggcgttgaggtacatctttgccaataccatacgggcagccccttgcgtgaacttaccgtagctggcgtctgatacatcggagcgcaggttcgggatgatctcggttaattccttcaccacgtatttatacagatccgcacggctcgtgatggagggcaaggaggtatcctcaaaatctgtcactaatggagcgttaccgaaaatatctacgattacataataccagaaagcgcgtaatcctcttagctcagacaagtattgaagcttaagttcatcgctcatcgcctcgcttttctctataatattatatacggaattaactgtggttaaaccttccgtacaatatgtccagcaattctccacggagtaagagttcggtttccaactgtgcatacattgttccatgtattgtccgccgtcccaccagtcgccacctacacgtgtcggtgctatcaagatatcggctgtcatatcggccgctccccaaggaccgtcataagccagcatgttctttagggattggtatgccggagccatgatcgcattaatctgcttttctgttgtcccgaattcgtcggtaggaagcttgtcgtatacgttctcgtccaaatccatgcaagagacaagtgctaccggagcgagtacggcacatattatatttttgaataatcttttcatgatcgttactgtttgtgtattagaaattcaagtttaatccaacagagaatgtgcgtgccttcggataaaattcacgaggttctacacccggggtcaaaccgtctcctgaatccataggaacttcgggatcaagacctttatatttcgtgataacgaataggttttgcgccgtgaaataaacacggataccattcaatgctttgatcttataacctaaagtcaagttgtcgagacgcataaaagaacctttctctaagtaatagttggagaatcttggagtttcgcttaacgtataggtcaatggatcatccaatgcgtttgttcccggcaagaatccggattgagcgtatgccatgcgggtcgcgttcaatatatcattaccgatcgttccacgcaagaagaatgacaaatcaaaattcttgtagcggaaagtattggtgataccatatgtcagtttcggttgagcggatccgatgtagtcataatccgccggatcggaaatctcgccgtcaccgtctttatctaccatgatatatctgccgttctcatcgataccgttgcaaaccaagccatagaattgtccgatagggcgtccctcttccaatacgtgtgtaccgctggagcttccaccccggatgaatacgtcacctaataagatcttatccattgtaaatacgtcgttggatagacgagtcacttcattctcattatgagccaagtttaaggagatgttccaatcgaaatccttcgtgcggatagcgtctgcgttcaaactcaactcgatacccgtattacgcatatcgcccacgttagccatgatctcgctatataggtaaggaggggttggcaccggataggtataaagcatgtcagaggtctttttgttataccattcgatacgaccacctaggcggctatccaatacggagaaatcaagtccgatgttcaacatcgctgtctgttcccattttaagtctgggtttgcgttttggctgattttataagaaggtagccaagaaccggtatcataatatacaccatctgtgccgtaaagctcgagggttttgtaggggtccaatcctgtttgattaccagtgataccataaccgacacttaactttaagtcgttaagccagtttactttttccatgaatgactcttgggtgatattccaacccacggaaacggaagggaaggtaccccatttgttattcgttccaaatttagaagaaccatcccggcgtacggtagctgtcaacatatatttctcattgaagctataattggctcttgcgtataaagagatcaggcgactttgccatttttgagactctgcgtctcccggattcagattttgtcccgcggctaaattgttagcacctaataaatcagtgacgaaaccacgggtctgtacgtgagtctcctcataattctcttcttcccaagagtaaccgatcaaggcattgatcttatgcttattgaactcagctgaataattggcggtccattccatcaagtctttatcacgtagtctggaccaacgttcggccttaccgccatcgttgtaaccggcttgagactcgatactgttgtatttgctctcatcttccgtattccggcttttagctaaaagaactttagcctctaagccatcgataatcgtataaccgacatcagcggttccatagaaattattgatgcggttcttatgtgtattctctttctggttacgtaccgggtttccttggtcgtattcacgtgtgtcgaaccaagatccatcctctagcttaaccgggcgaacgggaatcatattgtaggcaagtaagaaattggtcgcattggtcggcgcgttatctgtaacggtagccacgccggtgatgcttactttcaaacgatcctctagagcacgttgggagaattggaaacgggcgttgtaacggttcatggagttatcgcgtgcgataccttcacgttgcatataagaaagggaacctctatagttatggtgtgaaccacctcctgataaagacacggcatgatcctgttggaaaccgattctcgtgatctcgtcgaaccaatccgtgttcgctcccatgtcaaaatccttaccgtccttacccggggtagaggaagtatagctacgccattggtccgctgttagtagattcggcttgttagccaaggtagatacaccgaacgctccattataagcgatggtcggtttgctggcgtaacctttcttagtcgtgataaggataacaccacccgctgaacgggaaccgtagatagcggctgaagaggcatctttcaagatagagatagattcgatgtcctgcggattaaccgtagacatgtccatgcccggcacgttatcgataacgattaacgggccttggtcgttttgcaaagtggatagacctcttaattgaatcgtcgagttgcccgttacgtcgccggaacctgtattgatcgttaaaccggccaccttaccttgcaacaaatccgctgcgttacgagtcagaccttggttgaaatcctcagcggtcacgttggtgatagaaccggtaatctcacgtttcgtctgcgtaccgtaacccactacgactacctcgtccagtttttgagtgtcctctttcaagtttacattgatctcgtttttgccgcctaccggttgcaactgtgtcatgtaaccgatataagagaactcaagggtcgcgtttgaggatacttccataacgtatttaccatccagatctgtaatcgtgccgttggtcgtgcctttctcgactacgttagcaccgataatagcgtttccttccgggtctttaacgacaccggtgatgcgtttcttagtctgttgggcgacaatgtttttattaaatacattgatatttcgtccttcgatcgaatatttcaaactcgtgttgcgtagtgcttgcgataagatattttctatggacttatcggttgcgttcacgctcacttttacgttctttacgtcagaatccacatagaagaataagaaatcgctttgtttttctataatagcgaatagatcggttagcggggcttgatccgtcttcacggaaatcgttacagattgtgaataggaattagtcgctaccgcttggaacagtgtcaagaaaagtaaaataaaggacatttttaggaccgagagcattttttttaagtctttggacctaaaagacctataatacgaaacattttccatatttttgtactgataaaaggttgataatatgcgtctgccacaaaatttggtcgtggagtagcagaagcaggaattaattctttttaatggggccggctgtatttttgcagccggttttgtttttttgaaagataggatccgtgttatctcataggcattgcttgttttttaagatgtgttgatatttttattttattgaatatagtaagttccatctctttgtgaccatttgatcggcaaactacgagagatcacttgtaaaatctcctttaaagattgatcctcactgaatgttccggatacagtgacattcgggtccagcaatctcttgttttctatatggatcggaatctcgtatcttttctcaagctcattcagcaaggtacaaagcgctattgatttatactttaacaagccgtctttccatgccagattttcttttgcgttgacggattggatatcaatcttgttcgttgaacggatgaatgtaagttgctggtcgggagcgagtaagacttgttgtgtcgggctttcgaaacggatagacccttccagcaggacggccgtgatctgatccttccctttatcggcttttacactaaaggtcgtacctaatacccgtatggaggcatttcccatatcgacgatgaaaggtctttccggatttttcgtcacctcgaaataggcttctccttccaaattaacctttcgctgatccgtaccgtatgcgtcagagtaggtaaagcgactattccggttcaaaatgatcttcgtaccatcatctagcgtaaaatgagatttatttttatcggttatataggtatagaattgctgaaccttagcttcccgggtatttaagtgtattgtcgcgaaaaacagaacaagaaaggcgattgccgccgcaatgggagtagcgatgaaacggatcagcctcaatctcttttgcctgctttgatcgtcgatcttctttctcaaattatcgagggacacattaggcattaaggaatggctgaacgagacttccgcatcccaataactctttagcaaccgaaattcttttttgttcttttcgtctgcgttcagccattcgctcagcgaaagaaaatcttccgaggagctgttgccacttaatatccttgtgataatatgatctatgctattctccattttaagttgtttctatactaatagtcgcaaccaaatttgaaaacccttagtgggagcatggattttttacttatttttttcgtagctcatacacgagttctttgtattcggggatcgcgttgaatgaggggcattgtttgatccattcatccggcgagatcgtcccgtctccgtttaagtcctccgagagatcccggtgcccacagacccatgagccgggaaagcagattaagagatgccggatcaaacgtaacaacgaggtcttttgagcctgtgtgcgggtatcccgtggctgtccggtgatgtccagtccaccctcgtagcaaatcccgatgctgtgtttgttgtgtcctctcgcatgagccggaatttgctctagcgggcgcaggttcaccacttctcccgatttacggatgtagaagttgtaaccggcacggagaaatccccgtgccttgtggtcactctccagttgctccgggctataatccgtattctcacgggttgccgagcaatgaatcacgatcaggtcaatttttctcatatctcgtccgggctttcgctatcagaacctgcgctctttttcgtaacctccagaggctcgaaattcacctcattgcgggtagtccgcagggccgagcccgggaaaaagataatacgtgccccctttatcttggtggcgtcgaagtcctcgggcgtattcgttccttcggagttaatagacatacggaagttaccaaattctcccaattgcaccacgttgccggaggacagttccagatccatcgcccagtttaatgaatcgagcactgctttcacgtccgccgacgaaagcgtggagcgagagcaaatcagtttacataatttgttgaggtccgaagtccccgacgttttagcgattgcgtagttctttactgagtctttctctgcgccgttcaataccttacgctttactactttaaatttcactgccataattttaaattttaaaaggttaattactaatgacaatgcaaagatagaccctctgaaaaacgggaatcggcgagtgtcggtgagtgtcgggatatgtaagtagtagtcggtttacttgttattctggttttttattacgtaatttgcgttacgtgaattgcgtaatgcaaataagatgctgaatatgaataatccttttttaatagttggttatcaaggtccagaatatttttgtgatcgggagaaagagacagaagtgattttatccgctcttcataatgggagaaatatcacgttggtaagccggataacctctcgcaatctacgttgaaggagattttcgactacttgcggcagtctggaagagaatgttatctggctattgacgagttccagcaaatcatggaatatcctgagaaaggggtggaaggcctattgcgttcttatattcaatttttgccgaatgttcattttatcttttcggggagtaaaaagcacttgatggaatatatattcttctcaatcaagcgccccttctatcaatccaccccaaaattatttttagacaagatcagcaaggaggtgtatttttcctttgcccattctttcttcgagaaggaagggaaggagcttccggaagaaatatttgataaggtgtacacatgggtagatgggcatacttggtatgtgcaatatcttttgaaccgtctcttcgctttaccggaaaaaacactttctccggagcttcttgattctctcatgatggagatcctacaggaagaagaatatacctaccagacttatttccaattgttgacatttaatcaaatccagctattgaaagcgatcgccaaggaagggatcgtccgggaggtcaatgctgccgccttcatcaaaaagtatgatttgaaggcggtgagtaacgtgaatacttccttaaggatattaatagataaggagtttatattgaggcaaccggatgggtatatcgtgtatgataggttcatgtctatttggctcagccggatatgacaacggatgaaaaatatttagttgacacagttcgctcgtaccaccaaaaattattccattaatattatgatgggattatcttcttctgccaatttctggagatcttccctataaagacgatacaattatcatcatcggtaattcgattattcaactcttttacttttctcaatacctccggagatagtttttgagtggaagtcaaaaccttttccaattgctcttttaatgcgtaaggttccatgatcgcagtgaaataacctcggttgaaggacggattggtaggtccgtctatattccctagcatattccatttcaaattcacgaaacaacctttaaggctttgtttgtctactaggattttcgggaaacggggtaactcattattccatgaggtctgtgtataccaagtgactagaaagtgattgggcagctccgtgaaataatggcagatcggctcatgacccgtatgcatcgtaaaaacagggtgtagcgtattcgagtctatgtcataatgataaagtgtgtcttgcgaggctatacaattatgaagatagaagtcggaagcggtggtattcaaggattcccgtacctcataatcgtaagtgcttgggatcaacatgaattggtcggagaccggatattcttggatgatattgccttcgaaatcctgcgtccagatcaatgcggtgggagttccctgaaaaggtatgcacatgacggttactgtttttttctcggtattgatgacaaaccgtcctttatgggttatataggccagaggaatgtgtttttgtggctgcccgtcgaagtcaaacactaatatcttagaggcacgaatctccattagatagattttattattactttcatctaaatactgatcataaataaataggttatattcatccggcccttgtccttgggaggagatctttctgatgaaatccccattacggttatagagcttacatgaagagcctgccctaaaagatttcactaaaatataatggtcactcacggctatatgggtatcttgtcctgcggcggtcaatgcgtcttccgagttttctaggcgaataacttgaaaggaagatagcaaggtgcttagcgataaattgaatgtatcctttacggaagaaaagtctaaattagtcacaggatctccttgcagattaataacctgtgctatgaccgggcaattatccaaggtcaactttctggatacatttgtctctttatttccgcatgaggaaacaaccgttagtaacgtgatcgatacgtaatatatgattttattcatgcgttttattatttaaacaatgaatattacacaagttgaatcattccatgataatggaatgatgatttgtatttacagagtcctcacaacaaacatatacttcttcctgtatataagcaaataatatctccggtattttcgtaatagtgttgtttagcatttcgaaattctatttttttcttaatagttccttttctccttatatttataatccaccccgaatagggcgccggcgaaagtggagacttcaccgaagccgattaatacggaattatggatctctcccgtggggctacaccagaatcccatgaacagcagcgagaggccggctaggcataacatcacggctactgttaattgtatatttattcttttctgatacttatttcttttatggttcatagatgagtttttattttgttgaggtcgttttttttaaaatcacgatgagggcaaggcccggtgctagccataaccaccaaggaaccgcctgtctttttcgctccttgctcttttgcgatacgtgtgtggcggtgccggtttgtacggatcgttgggcgctggaccgggaagaggtatccgtagccgatcgccgggatcgctgccgcagggtggcggtagtcacggatagtgggtattgccgtccggtgctgtcggggatggagagggtcacttggcgcaaggttgccgataggtgattctggctgtcgcttccggctttatgaaagagatggtcgatacggatcgccgagatggagtctttctcttgtttatacagtctttgcttactatctcgtgaaacggagcaagataatacggatagggtgattagcccgatacatgcgagtttattcatatgcttcttttttccgcaaaggtaagaggccgaaaaaagggcagtcggccagtgtcggtcaatgtcgggatttgtacccgaaaaaaagacgtacgtgttttcggaaaaagtcgtacgtgtttttcgcaaaacatgtacgtgtttttttgagaacatctacggccgtgattcgctcgagaaaaagagttggattacgggagaaatcaccgtcatgccgttaatactggaaagttaataattgaggcttggaaattaaaggttccaattctcagggtcgcccatatgatcgacgatggtccgcacttgcaagggcgtgtagaggcggaggcctttacgatagccgatggcttcgagggcagacagtagctccgggtcccggcggatgaaacgggtcaattgcgtggaggccgaggaggggagtacgttcgggaaatataaaagggccaactcttgatggccatagattctattcgtgttcatgatgttgctgtttttgttcttttaatcttaaatactcttcatacgtgataccactcgaggagggggtggtaatggcgggagctgccgtgtccggttgccggtagcggacgctctccttccgtcgctcatccatgaattgcaggagcgaggtggtgatggtcaaggcatccaccgatccgtagaagcgtccgtaccgcccgcatttcagccggtggaagaacaagagcatctcggaagcttttaaaaatgggtactctgtgagaatcaagaccgatagctctttttggcggctgacgggcattttttcttttacccccgcgaacaggtttacgttctccagctggatgcagatccatacgatagctaccggttcgccgtagccgacggctatcgtggccaacgtaggggccgtgcccgtataggtccgctccgggtgacgggcggcggcgatctgtagatcgggggtgaatatcgataggaaaccttgggcgtctccgtatcgtttacgcatgtcggctagcgcttgtggcgttggctgccatttggagtagctcggctctgcggcctgcctctccgttatcgtttgaggtcgaatgttcatttctagcttgaatttttgttaccgtgtttgttttattttcttttccttttccttttggggttgtttctgtcgctaaaaccggggtttctgtaacaggaaccgatatttctaccgtagaaataggggcggtctcttcccggagttcccattcgggggagatacgggatatgctccgcttgttgattacccgatagcgggattggattccgaaagatgtgaggattccttgcagggcgaatagttcttgattaaataatcggatctcaacacaaaatccgatgatctcacggatctgttcttccttcagattgagcgtaaatccgatatcaaaacagaaattgtccgtgtatcggacgtaatagcccgtggttccatacgcttcacacaggatcgccatgtaggtggagaaaccttcgcatccataattttgaaataagcgacgtatttttcgatcggacagtatatcggtatccagcggaaaatagcttaatccctttttgattggtctcgacataattttaaaaattttgtgtggcattccggttcgttctcccgtacgagggatgaagaagtaggtttaaggttcggctaacaaactcgaaaacgaaattcgactctctcttccatctctatttggatgcgaacttaattattttagatgaatttagactttaaatagggtatcctatactataatgtacccgatccccatcggcgtaaaaaagttcaaaaaaagtcgttataaaatttggatgttataataaaagcgtatacttttgcacccgctttcgagagagaacggcgcttcagaaatgatggaaacgtggaggtatccttgggtaggggatgaggttggctaggccaagcgataatttccaaccgcccggagatcggcttgagaaaaaaaaacttgaaaatttttcaccgaaaaatttggaggttaagaaaaagtccttacctttgcagccgcaatcgagaaacgatagcgagagggttctttgagagatttacataattcaacaagtagtacaagtattaggaaaagaaattttccggatcgataccgtcaatagaagtatgactttggactacgataaacggattccggagcgaggatatgataaaacaatttaaacaacgaagagtttgatcctggctcaggatgaacgctagcgacaggcttaacacatgcaagtcgaggggcagcacaggtagcaataccgggtggcgaccggcgcacgggtgagtaacgcgtatgcaacttacctatcagagggggataacccggcgaaagtcggactaataccgcatgaagcaggggccccgcatggggatatttgctaaagattcatcgctgatagataggcatgcgttccattaggcagttggcggggtaacggcccaccaaaccgacgatggataggggttctgagaggaaggtcccccacattggtactgagacacggaccaaactcctacgggaggcagcagtgaggaatattggtcaatgggcgtaagcctgaaccagccaagtcgcgtgagggatgaaggttctatggatcgtaaacctcttttataagggaataaagtgtgggacgtgtcctattttgtatgtaccttatgaataaggatcggctaactccgtgccagcagccgcggtaatacggaggatccgagcgttatccggatttattgggtttaaagggtgcgtaggcggccttttaagtcagcggtgaaagtctgtggctcaaccatagaattgccgttgaaactggggggcttgagtatgtttgaggcaggcggaatgcgtggtgtagcggtgaaatgcatagatatcacgcagaaccccgattgcgaaggcagcctgccaagccattactgacgctgatgcacgaaagcgtggggatcaaacaggattagataccctggtagtccacgcagtaaacgatgatcactagctgtttgcgatacagtgtaagcggcacagcgaaagcgttaagtgatccacctggggagtacgccggcaacggtgaaactcaaaggaattgacgggggcccgcacaagcggaggaacatgtggtttaattcgatgatacgcgaggaaccttacccgggtttgaacgcattcggaccgaggtggaaacaccttttctagcaatagccgtttgcgaggtgctgcatggttgtcgtcagctcgtgccgtgaggtgtcggcttaagtgccataacgagcgcaacccttgccactagttactaacaggtgatgctgaggactctggtgggactgccagcgtaagctgcgaggaaggcggggatgacgtcaaatcagcacggcccttacatccggggcgacacacgtgttacaatggcgtggacaaagggaggccacctggcgacagggagcgaatccccaaaccacgtctcagttcggatcggagtctgcaacccgactccgtgaagctggattcgctagtaatcgcgcatcagccatggcgcggtgaatacgttcccgggccttgtacacaccgcccgtcaagccatgggagccgggggtacctgaagtccgtaaccgcgaggatcggcctagggtaaaactggtgactggggctaagtcgtaacaaggtagccgtaccggaaggtgcggctggaacacctcctttctggagcttcaggattccgtaccgaggtcatacgaggtattgatccccttgtgctgctgttgagattatgtttatatatagatcttacagaccgggaggccggtcaaaaagagagaaaatgacgctgggacgtaagtcttggcaaagttgacagtcctatagctcagttggttagagcgctacactgataatgtagaggtcggcagttcaactctgcctgggactactccgaatgagggggattagctcagctggctagagcatctgctttgcacgcagagggtcaacggttcgaatccgttattctccacacatcccgcgagggaaagaggatctttgacatgttggacatcaaaaagaagaaacaagtagagcgagcttaagatatatcaacccgtgcgtcaagtgcgaggtgagagaaagtaagcaagggcagacggtggatgccttggctctcggaggcgacgaaggacgtgataagctgcgaaaagcccgggggaggcgcaaatagcccttgatcccgggatatccgaatggggcaacccggcaggctgaaggcctgtcatcccgtaagggaggcgaacgtggggaactgaaacatctaagtacccataggaggagaaaataaacaatgattccgtaagtagtggcgagcgaacacggaagagcccaaacccatgtcgtctaggcgacacgggggttgtaggaccacgacgtggcaagatagagtcaagtggaacgccttggaaagggcgaccgtagagggtgatagtcccgtacacgactgacgattgaagcctagtggtatcctgagtagcgcggggcacgagaaatcttgcgtgaattagcggggcccatcccgtaaggctaaatactcccgagagaccgatagcgaaccagtaccgtgagggaaaggtgaaaagaaccccgagcaggggagtgaaatagaccctgaacccgtctgcctacaagcggtcggagcgtcgtaatgacgtgacggcgtgccttttgcataatgaacctacgagttaccttccccggcaaggttaagtacctaaggtacggagccgaagcgaaagcgagtctgaacagggcgccaagtcggggggggtagacgcgaaaccgagtgatctacccttggccaggttgaaggttgggtaacaccaactggaggaccggatgggtaagcgttgaaaagctttccaatgagctgagggtaggggtgaaaggctaatcaaactcggagatagctcgtactccccgaaatgcatttaggtgcagcctctttatagtatatcgtgaggtagagcgactgattggatgcgagggcttcaccgcctatcaagtccagataaactccgaatgcgcgatatatatttacagggagtgagggcgcgggtgctaaggtccgtgtccgagaggagaagaatccagaccaccggctaaggcccccaaatgatcgttaagttgaactaacgaggtcggatcgcagagacagctaggatgttggcttggaagcagccattcatttaaagagtgcgtaacagctcactagtcgagcgatctggcgtggataataatcgggcataaacgatctgccgaagccgtggatgtcgcaagacatggtaggggagcattccatgcggcgtcgaagatgagggatgacccttgttggagcgcatggaaaagcaaatgtaggtatgagtaacgataaggggggcgagaaacccccccgccgaaagaccaaggtttcctgatcaacgctaatcggatcagggtgagtcgggacctaaggcaaagccgaacggcgccgccgatggaagaatgggttaatattcccatactgcctcatggagtgacgtggagacggagaagtgacagtcctgccggctgacggaatagccggttgaagggtgtagatattgattcccgtaggcaaatccgcggggagagtcgaacctgagagtatacggagcgcttgcgcaacgtaatatggacgtaaccatgctcccgagaaaatccgctaaacttatccatgcggcacccgtaccgtaaacggacacacgtggtcgggttgagaatactgaggcgctcgagtgattcacggttaaggaactaggcaaattgaccctgtaacttcgggataaagggtcctcgtcgtaaggcgaggcgcagagaataggtccaggcaactgtttaacaaaaacacatggctgtgctaaatggaaacatgatgtatacagcctgacacctgcccggtgccggaaggttaagaggagatgtcatccgcgaggagaagcgttgaattgaagccccggtaaacggcggccgtaactataacggtcctaaggtagcgaaattccttgtcgggtaagttccgacctgcacgaatggtgtaatgatctggacactgtctcaaccgtgagctcggtgaaattgtagtatcggtgaagatgccgattacccgcgatgggacgaaaagaccccgtgaacctttactatagctttacattgagtttgggcagacgatgtgtaggataggccggaggcattgaagcaggtacgccagtatttgtggagccgacgttgaaatacggcccttcggttgtttgagttctaactcctagttaggaggacactgtatggtgggtagtttgactggggtggtcgcctccaaaagcgtaacggaggcttctaaaggtgccctcagaccgattggtaaccggtcgcagagtgtaatggcataagggcgcttgactgggagacatacaagtcgatcaggtaggaaactagagcatagtgatccggtggttccgcatggaagggccatcgctcaaaggataaaaggtactccggggataacaggctgatcattcccaagagctcatatcgacggaatggtttggcacctcgatgtcggctcgtcacatcctggggctggagaaggtcccaagggttgggctgttcgcccattaaagtggcacgcgagctgggttcagaacgtcgtgagacagttcggtctctatctatcgtgggcgcaggagatttgcgaggctctgacactagtacgagaggaccgtgtcggacgtaccactggtttaccggttgtcccgccaggggcaccgccgggtatctaagtacggatcggataagtgctgaaagcatctaagtacgaagccggcctcaagattagatctccctcaagggtggttatagacgatgaccttgataggccacaggtgtaagggcggcgacgtccgagccgagtggtactaatagcccgggactttcctcacagtgaaggttgatatattttaagacgataaggcgaagctggtctcttcggattgatgtccggtcaaaatcttgataatgatattaaggtggctatagcacgagggatccacctcttcccattccgaacagagaagttaagcctcgtcacgccgatggtactgcgtaacagtggaagagtaggtagccgccgtcttaggtgaaaggagtcagtcgaaagattggctcctttttttggtatatacaccagccgttgtagagatgtggcacgctacgtctttacaaagagggaacgtggatagattagtcgtttatttctttagctagagattcccgtagtttccggactgccgtggcgatgtgggcttctaatgtctttactgatatttctaggatatttgccgcatccttatatttcatcttatcttcacggatcagtttaaaagccatcttgcatttatccgggagcgtattgatcgcctcatttaaatgatcgatgcattctttggaaataagttcttcctcgggcgtagtatcggtatgtgcgaataaatcgatcgtattctcatcgatctggactttctccatatgctgtgtccggtataggctgatggctttgtggcgggctatgccatagatataagaatcgaagttagagatctccggtaatgactttctattattccaaagacttagaaatgtatcagagacaatttcctcagcttctacagaggaaggcacataaagggatgtaaaccgcattagcctctgaaaataggctaaataaagcgatttaaaagcagtttgagaatcggatagtgcgatttcacagacccattgcattatttctttggagtgtttttccaagtaactagaatcttgttaacttatttcccttctaaatatatagtcgcaaatgtatataaaaacccttagtggatctctctcttaaaagagaaatacttgatgttaatttcaacctaatttcatatctggttgtttttgaatctaatccgcaggttgtaacatcattgtaatatgtatgtaacggatgcgaaataattgtttcagaactttgcgcaagaattataacaatcagtatggaaacattttatttgttcttggtcatatttttgtttgtattggccatcgtagatttatcggtcggtgttagtaatgacgccgtgaatttcttgaattcagctatcggcgcaagagccgcatcctttaaagttattatcgctatcgctgccgtgggagtctttgttggtgcggcgttatccaatggtatgatggatattgcccggcatggtatttatcaaccccagcatttttatttctcggagatcatgtgtatccttgcggccgttatgcttacggatgtggtgttactggatatttttaactcgttaggtatgccgacctcgacaacggtttccatggtgtttgagttggtgggtggaacggtagcgattgccttggtaaagatcgctagttcttcaggcgctttgcaattgggggatctgctgaatacagagaaggcttttaccgtgattctgggtatctttctttctgtggcgatcgcttttttctttggtgtgatcgtgcagtatctgtcccggatcttgttctcatttaattataagaaaagttctaaatattttattggtctgttcggaggtttagcggccacttccatcatttactttatgctgataaagggactgaagacaagttcttttatgacgggtgagttcaaggatatggtgtatgccaatacggggatgatcgttttgggatgtatggtattttttacgatcttgatgcaggtattgcattggttgaaggtgaatgtattcaaggtggtcattttgatgggtacgtttgccttggcgttggcttttgccgggaatgacttggtgaactttatcggagtccccttggctggctattcctcttatatggacttgatggcgcagggagggaccactaccacggatacatttttgatgacctccttgttgggaccggcccagacaccttggtatttcttggtggggtccgggatcgtgatggtaatcgccttggctacctccaaaaaggctcagaacgtggtgaagacttccttggatctgtctcgtcaatcggatggagaggagtctttcggtacatcgcctgtcgcacgggtattggtacggaattgcagtaatatatccgctacgatattaagtatcgtgcccactccggttaagaactggattgatagccgtttcgaccaaagcgagatgatcatggatgacaaggctagcttcgacttggtacgtgcctcggttaacgtggttttgtccggcttgctgatcgctttgggaacctccttgaaattgcctttatctacgacgtatgtggctttcatggtcgctatgggtacttcgttggcagaccgtgcttgggggcgtgagagcgctgtatatcgcatcacaggcgtattgtccgtgataggtggttggttcattacggcaggggctgcttttacgatctgtttcatcgtcgctcttttgatttattggggaggtattccagctttggtcgctatgattggtttggcgatctattcgttggttcgtagccacttcgcttataaggctaaattgcggaaagaggcattgaaggaggaggtgaattctacggtgtctaaacttcgtaaggctacggatacccgtgaggctttggccctgttccgcgagcatagccgtgaggaattacaatccgatctggattttacggcggaagtattcggcaaggcggtaaatggattcatgaatgagaacctccgtgagttgcgcaaggtcttgactgccgtggaggagaagaagattcacttgaaacaagtgaaacgtgtcggtacgcttggcgttacccaattggatcacgatatcgccgtggagaaggggctttattattatcaaggaaatgacttcgccagcgagatcatattcagtatccgtcgcttggcagaaccgatgaaagatcatatcgataataatttcagcccgttgagtccggtacagaaagatgattttggtaaggtatctgaacaaatcatctccttcttgagaaattgcgctactatgatccgtaaaaacgattatattggctttgaggagctgatcgctgagtcgattaccttgatgaaccaacttaccgccttgaagaaaggggagttgaagcgtatccaagggcagtccggcagcacgaaggtaagcatggtttatttgaacatggtacaagaggcccagaacgtggtttcttttacggcgaaccttttgaaggtgagcaggaagttccagaaggaataatcagtctctattatattgggatgatgggagacggggcatgccccgtctctactggtttatagggttagcatcttcttttctttgactaaatcactctcgtccatccgcagggatgggactgtacacatcttgataaaatctcctgtctggcaagtataatcatagtagacctgttgttccggggtaaaatcttctttatcgatcagtccgcttttccggctcatgaattcatcgatctccgtgctttctgattccttgataagaaggattcggcgggcgatcgggttacgattataatcttgcccgatgtataatcctcgtaattggcgaggattcttgaaaaatggtatttgcaggtatatcgttaccatcgtgaattggggcgcttggttctcgttcagcatgcaatggaaattctgaggatcgggcatgatcccgaatccccattgagcctctccataagcgctgatccgccctacacggacttgattatccgagggggagagtaggaagggttccatcttgaggcagtccgaggaggaagaaaggctgtaactggtatagattcctttgaaagcctctattttagaggcggagagccgtgtctcctccatcaattgcttggcgaaaggattatcttttaggctatccggttcggcgaactccatctggtctaggcgaaggatcatctcctctatatgggaaagcaaacgttttttcgacacgttattcactagggcgagcgccgagtccagtgcttcttccggcgggtaactcttgatgccctcgaaataattcggcaatacggtcgtatatagggaggacaatatgctgggagccatatcgatccagtcggctatctctttcatcttaaccccattgcttcgtagatattcgatctttcggtagaattcttgaagattgttcatgtgtttatattcttgatttaccttacaaaataagaggacatatgttgcgtttccgtttcatgaatgttacataaatatttctttataatttattgattcctagttgggtattaataatatacattcatgggttcagtaatatgtctgtaacatggcggctgtacttttgccttcgaaaataaaacgacagaagattatggacactgcgatacagagcaataaaacatcccggaaacggatttccgatctccttttcatcctatgggccggaggggccgccttgctttcttattccttggtatatatgttgcgtaagccgtatacggctgccgctttcgaggatctggaggtattcaatatggactataaggtggcggtcacgatcgtgcagatcttgggatacgtggtgtcgaagttcatgggaattaagttgatatcggagttgcggcgggaagagcgtttgcggttcatcttgatgtccgtggtgatggcggaactttcgttggtattcttcgggttgctctcggctccttataatatagcggcgatgttcttgaacgggctttcgctgggatgcatgtgggggattatttttagctttatagaaggacgtaggatgacggatgtcctcgctagtttgttgggcgtaagtatggtgatcagttccggtacagcgaagtctgtcggcttgtacgtgatggatatatggcaggtcagcgagttctggatgccggctttgatcggggcggtggcattgcctttgctagccttgttgggatatgcgctaaaccggcttccacaacctacggaggaggatatcgccttgaagtcggagcgggagaccttgaacgggcggcagcgttgggagcttttcaagaacttcatgcctttcttgacgatgcttttcgtggcgaatatagcgatcgtggtgttacgggatatcaaggaggacttcttggtgaatatcattgatatgtccggttactcgccttggttgttcacgcaaatagatagcgtggtgaccttgactatcttggcgatctttggtttgatggtgctcgtgaaagataattttaaggcgctttcagtcctgtacggtttgattattacgggcatgatggtcatggcgttcgtgtcgttcgggcaggagcggatgggattgagtccggtgacatggcttttcttgcagagcctctgcctgtatatggcttacttaaccttccagacgattttcttcgatcgcttcatcgcttgtttcaagatacggggaaacgtcggtttctttattgtcttaacagattttctggggtacacgggtacgatactggtattggtgctaaaggaattcgtgggtacgagattggattgggcagtattttataaccaacttgccggatatgtagggatcttttgctgtgccacttttgtcgcttccttcgtatatttgcggcaacgctatcgcaaggagaccgctttatgtggctgcgaggaaatagcaactcttgagcctaccgaaaacaatgtccttacgatcgcttaaacaagaaaattattaaatacgatacatacagaatatgaagaagatttcaggtgtcattatggattgggccggtacggccgtggattatggatgcttcgctccgttgaacgctttcctcaaggtattctcggaagagaaagggattgatatcacttaccggcaggcccgtgagccgatgggtctcttgaagatcgatcatatcaaggcgatcttgagtatgccggaggtgaacgagaagttccgtgccttgtataagagggactggaacaagagggacgtggatgagatgtacactagtttcgagaaacatttgttcgcttccttgaaggatttcaccactccgataccgggagtcttggagacgatggcgatgcttcgcgagcaaggtataaagatcggctctacgaccgggtacacggcgaagatgatggagattgtccgtcccggagccgaggccaaaggatatagggtagataatctggtgacaccgaacgaggtcccggccggtcgccccgctccgtatatgatctataagaatatgatcgatttggcgattccttccgtagatcaagtggtgaaggtaggagatacgatcgctgatattaaggagggcgtgaacgccaaggtatggagcgtcggtatcgtgaccggtagcaacgagatgggcgtgagcgaggaggaatataacagccgtccggcggaagaatgggaatctctgaagaaagaggtgcgtgagcgtatgttggcggcgggggctcatttcgtcttggatacgatcgccgagctgcctgcttgcattgagaagattaacaacagggatcaagcctgataaccgaataaaataaaacaatcatatgagaaactatttattattgacaccgggtccgttgagtacgtcgcagacggtacgtgaggccatgcttcaggattggtgtacgtgggataaggattataacgagggtatcgttaccccgatccgtaaaggcttgctggcgatagcgggactggacggggatgcgtacaccagtgtcctgctgcaaggtagcggaacgtattgtgtggaggctacgatcggggccaccgtgcgtccggaggataaattgttgatcctcgctaatggcgcttatggcaaacgtatggcgcagatcgccgattattatcatatcaattacgtactggtctctttgcatgagacggaactggtaaccggcgaggtagcccgacgtgccttggaggagcattctggtatcacgcatctctcaatggtacatagcgagaccacgaccggtttgttgaatccgattgaggaggtagccgaggtgatcaagggccgggggattacctttatcgtggatgcgatgagcagctttggcggtgtccctatcgacgtgaaaggtttaggtatcgacttcttggtcagtagcgcgaacaaatgtattcaaggagttcccggcttcggctttatcctcgcccaaaaagataaattgatggcgacgaaggggaatgcccgctcgctttccttagatatctatgcccagtgggaagcgatggagaaagggggaggcaaatggcgtttcacgtctccgacgcacgtggttcacgctttctaccaagcgatgaaggaattgaacgaggaaggcggtatcacggctcgttataagagatatcaagagaatcaccagatattggtggaaggtatgcgtggattgggtttcaagaccttgctgcccgatgatgcccaagggcctattatcacttcgttcttatatccttccgcggatttcgatttcacctcgttctacgcacggctgaaggagaaaggcttcgtgatctatccgggtaagatctcggatgcggatacgttccgtatcggtaatatcggagatatcttcccgaaagatatggaagccttgatacaagcgattaaagagatccggtaatcgatgcccgtaacgtaacgagtccttcggggcccatattgaacagcaaatcagcaatactcagattggggaggaatccgaatttctcccggaatacttgataataaggttccgggtggaaggcgggatcttccccttcgtgtttcgggcggatcgtttcccggaaatcgttggctacctctggctcataatgctcggtgtagacgactgcgggttgcatatccaacaggtcacagaccagacggcgcaattcctcgttgaagtcgaggaggaactcgtatttcttttcgtagaaaggagcgaagtcatcggcataatactcgaaaaacggactcatattgtaggccgataccaaagcgttccagtgtaggtgccgccagtttccgtggtcggagatacggatgtccttggtctggcatttcaaggtatccggcttgacgatggggatggatagggagagtgggccgttcgcggcggcgatggaacaacggttacgataggtttgcttcacgtaattctcggcggtctcgatacggacctccgggtattggagcatcttacaatattgttgtatggggcctagataggcggtcgctatatatacaggtcgcatgattaatgaacgggtttaaagattcgttgtttgtcggggctgtaccagcagagccaagcgttgccgacgatatggtcggccggtatgaaaccgagatggcgggaatctaccgcctcgttggtattatcggacagtacccaatagtagtcttgttggaaaaagaagaaattagtctcccgcccgtccagatataactttccgtcacggaaggaagctttaccatccgtctcccgcatgatgatctccttgcaggcggtgagcgaggctgcgtccagcgggtaagcccggtctttccgggggacgatcaacatgtattcttgcatttgttccccgataaaatgacggtttatggcatcgggcaattcctccctcaattgatattcctcgaaagccgtgaggctgagcatacagccgaaactttcctgcctgaaatccctaagtgggatgtccaacttctctaacgtctccaagaacgtctccttggcgctcagtgttatgaaataggaacagagggagcgaggagagcgggggattttatgcccgtttatcgtatatccgtccatgctgacccggatcgtatcgcccggcataccgatgcatcggctgatgaataagggagcatccgctgaatctcgagagagggggctggtaaaaagcacgaccttgccccggacgggcttattcttccccggtattttattgactaggatataatcccctttatgcaaagcctcttccatagagtccgtggagatgcgataggactctatgcagaaaaggcgtatgagcatgacgatccccgcggctagtgcgaaagctgccagccatttcatgagaactatcaggaatcgttggattgtcataatacgaagttttcacctcttaatccggatgcacccaacggaacaggcggttccaacggataccaccgtcgaacagactgcgatccttgtccaaggatagccaaaccaagatcggcttgccgacaatgtgatcctcgggtacgaaaccccatgagcggctatctgcgctattatggcggttatcgcccatcatccagtaataatcgtatttaaacgtataggaagtctcgggcttgccgttgatgtagaccttgccgtccttcacttccaaggtgttgttctcgtaattcttgatacaacggctgtacaacgccagattacgttcgtccaacgggatggtagcccctttcttcgggatccaaagcggcccgaagttatcacgggtccagccagtattgtatccgaccggataggtagggccgcccaacgtctccggctcgatgataaccttcttcacggtaggtaacttctccgctatcgccaaggcctttttcgtgagtggcaggcgatataccgggttgtactgtcccttcgcgttaggcgtaaagcctaggtatgacaataggttttggtaataaccgccgctggaggccagcatacggtcatccttgcttacgtccatcaaacggaattgctcctctgtgatcggggaaccgtctgtttcgatgaagtagttgaactgcatatctttcgggttctcggcgggtttaccgtctatgtacacttggttgtctatgagttggagcgtatcacccggcataccgatacaacgtttcacgtaattctcccgtttgtcgaccgggcggtacattacctcgccgaacgtggccttatccaataagatacgttcccgtccgtactcctcgaccaaggagtagtaatccgggttttgcactttcacggcgatcgtgtcgcctgcggggaagttgaacactacgatatcattacgtttcacgtggcccaaacctttcacccgtttgtagccccattccggccaatccagatacgatttgcagttaaagatcggcaacgtattttgtaccaacgggaaggagatcggagtgttcggaatgcgagggccgtaacttaatttgctgacgaacaggtaatctcctaccagcaaggatttctctagggaagaactcggtatctgatagttctggaagacgaacaaattgatgaaataaacggctaccagtgcgaatacgatatcgtccacccattccaatacgttgcgtaccgccgggttcttagaccgtttccaagctccccaagggatgtagtgcgtcaagaatatatcgactaggacgattaatcccagcagtaaccataagttttgcatccagatagcgaacaacgtgtataatacggccgctatactaaacttgatccattgttttttcgtgaacttcttcatcttttagctaatacgtttagaatttgaataagtcattcatgcctaggaaacctttctttccggcggtaaactctgccgctattacggcgcctagcgcaaatccggcacggctcttggcatcatgcttgatactgatcgtatctacgtccgactcatacgtgatctcgtggatacccggaacctcaccctcacggatggcgtggatcggcaggtcggtcgcgttctcggcgttctctaaggtccagcggtctttacgatcgatgttttccaagattccttcggccaacgtgatagccgttccactgggtgcgtccagcttgtggatatggtgaacttccgtcatcttaacgtcgtaggaggggaagttgttcatgattttcgccagatacttgttcatggcgaagaagatatttacgccgatgctgaagttggaggcgtagaagaaggttttaccctctttctcgcatttctccttgatctcgccgatacggtccagccatccggtagtacccgatacgaccggcacgcctacctcgaaacatttcatatagttattgaaagcggtagccggggtagtaaactcaatcgccgcgtcggcgctcttgaacgcttctgaatatatatcctcagcgttattgatatctatgatggaaacaatttgatgtcctctctggatggcgatctgctcgatcgttttgcccattttcccgtaacctataagtgcaattttcatactttaattcaattaatgtcgcaaatatacagaaaatgaattacatttgaatccaaaatcttaactctgaaagaatatggaacgtttattacactatgtttggaaatacaaactctacgcgagtactccattgactaccaccgaggggcttcccatcgctgttatcgatcccggaatacaaaacaccgacgccggtcccgacttcttcaacgccaagataaagattgacggcacggtatgggccggaagcgtggagatccacgaaaaagcttccgattggttgctgcatcatcatgattcagataaggcatatgactccgttatcttgcatgtaacgggtgtgaatgacgcatctatctgccggatgaacggtgagcctattcctcaattgatattacccgttccggaacctgtccggaaaaatatcgattggttattggtaagagaggtgcccgtcccctgtcttgagcggattcaagatgtggactccgtgcatctggcctcatggatggataccttgctcagtgagcggctggaacgaaagacagaggatatataccgtctgctggatcagtatcaagaggattggaacgaggtgttctatatcctattaacccgtagtttcggctttggcgtgaatagcgacgctttcgagtggttggcgaaaagcctccccctgcgatatatccaaaagcaaagggctagcgagtcgcaagtagaggcgatgcttttcggacaagcgggtatgctctcggaagagggctcctgccattactaccgtctgctgaggcgggaatatgagtttctccgccataagttcgggctcaagcctttggatgactccttgttcaaaagcctccgtatccgtccgaccaacttcccgcatgtgaagttggcgcaactggccgctatctggcatcggtacgatacgttattctcgatgatcctgtccgcttcttctcctaaagagatcaaggattatttccgtatccaaccctcggattattggaagaatcattatcatttccaatacgcctcggtggaaaaagataaaatgatcggggagaatgccttgaatatcctgttaataaatacggtagtccctctgctattcgcttatggcggtcgaaataaacttcctgagtattgcctgcgtgcgacccgcctcttggagagtatcccgccggaacgcaatcatatcgtaaccgctttcgctcgatccggtatcgaagtccataacgctggtgatacgcaatcactcatccagttaaaacgagaatattgcgagaagcgaaagtgtttgtattgccggattgggttcaggttgctaaaacgaagtgttaatcctcctcggtaaaaggagctcttatatacttgccgtctttatgattattggtgatataacgtaatatatcgatcacctttccggttgaaaaaaacataccatgtggtatgcttgctgctttttcgtttgaaaaaagcgtattgcaaatctctcccgtatcggttgaacctcatttcagctgtatgggagagattataatgtggtgcatgaggtaaagtgtggatgaaatcgaggatatcatcgataagtatgtttgcgtactcaatgtatgaataataatctttctcaaataaggtgtcggctaaatccatcagataagtgattatttctttagggataataacttttgtgttattttctttgtgcgtttttttcatagaaatgttttcttagttcttgttttgcgtattgtctgaattcctcgatgctcaatcctttgttccaatctcgttcaaattcatcaaggttactatccgataggtttactcccaatcgtttcaatataggattgatcatatccccatatttctttaagtcgatgcgaacgtagctgttgttccctgccgcatctttctccaattcgatacctgatacttctgacatagttgctctatttatttggttatacttccatctattgcgaagatactgtttttaattaggtatctgccttatttcgggtgttttattttacaataagttcgatgtgaattactgttttgtaagagattgataaccggactcgaaaaaacatgtacgtgttttcgggaaaacaagctgatgttttttcccggatgagccgcgatgatattctttaggagagaaaaatgacaataagggcttttctcttctgtgttacaaaaattagttggtgcggaatccgtgatgtgggaatatccggacaatgctttatttataacatgatatgattaagaaaatctctctttatctactcaaatatcttggaatagttaaatataagacctatatttattgataggatttaacctattgttaataaagaaaggacggtggaagtaaacaaaaattttatcatgttattggcatatttatgccttagtcatatactgacgaatattcggggatacggagtactatatatgcttgatatctctgaggttggatcgggaagttatcagttaactggtaagggctttgggaggctatctttatggagttattgaaagatagtttttatatcgaatatttatgaacgtgcaatatgggatggagtatgagtaagaagtatatactgaggagtaaatggtttttgtctatggctgttcttttattatttgcgacatccaatgcgcaggagattacaaaggaaaaggaaccggctcggtttggtattggtatcgcctatggttttaaagatcgggtgaaggagctaatacatccgatagagcttacggtacggtataatctttcagaaaagcattcattttatgtgaatgtgccgttgggatggaaaagttggagagacgattatggttacgtagatcccgtcatacggggttactatactcataaaatgcgattgtatggcttgggcattggatatgattattccattgtgtcgtataagaacttagatctgtttgcgggtggaggattggaataccaaagattctattttcgatatcaggaggttcaagaaggaaagccttacccttttctgagagatagattcaatgattattctttatatcccaaagtgggattgagatatacgtggcgatttgtaggtgttgagtttgattatagatgctatttctccgtgagagggttggatcattattccgaacaattctcagaacttcctcgtgaagtggattatgatacacatatcgatcatgcttttcgatgtggagtgtattttttgttttaaacctttaaattgatttattatgaaacgaatgaaattgttgttatccgttttggtatgtttttttcagtatagttagtgcgatggcacagcatccagtgttaaaaccagacaaagacgtaccagagttcgttactccaaaaatgggatattattatgtattggatgcagggagtaatattgcccgagtaaattggactgtctcgggtgggtctttttcccttggttcatcccaaacctcaatccccggtgggaatttctatggtataaccgtatattgggataatgtgaagtctacaaatggtagtactcctcaagggaaattaacggctgaagtttattatagttcgggagttagcggagtgcagtcagcctcttacactcaaaaaataaaaagtttgaatggagtaactccgccttctcttacttcaaaaacttctactaatttagactatggagttcagaatataacagttttgcttggtcaaaaattttattacccgggacaaacaacaactggagataaaaatctggttactaaatatgagtagactttacctgaaggatggaaaagtggtactcaaacaggtgtatttactacttcttctgaatccatcaatattacgacaaataatgtcggtacaggaacagtcaaggtacgtggtgtaaatcaaggtgctgaatttgataaaagtgggtattcctctatatctttcactcgtaaatttggctttacggcttatccaacttctgttccttttggaaaaactcagactaatacatttaccactcaattagtgaaaggaatgacttatgaatggagtacgccctccggatggaaaatcaataatggaggaaatacgaaggaagggttggaatagaatagcgtaagtatcacctcaagtgtgtgccctacagatggaatagttaaggtccggttgaagaaaaatggtgaagtatctcaatggtataattgtccttataaaggaatttcagatccagcgataacttctacagctgcttaccaatttgaatatagtacgttagcgttggatgtcgcttcttcttcgttaagcaaggctacatggtccggaacgggtatatatgtggcatcagggcaaggaacagctgcccctaaagtgatatttacgaagtccggatctgttacggtgcaagctgttgttagcttgtcgggttgttccggtgtgcgaactatctctaagacatttaccgtatcacctttccgttatctgatttctggagaatccgtgatttgctataatggtaattatacgattagtaatgtaactgttccttctgaggtacaattgacttggagctatactaatggcaagctagagatacagggaggacagagtacgaaaacagtatctgtagggatagctccgggtaagtttggagatgagtggatacgcttgaccgctagtttaggaggacaaagtgctgcggtatctaaagcgatttatgcaggatatccaacagtaactaaagttaccggaccttcgagtgtacgcctaaatcaaggggggagttttatagcgaatcctctttatgataatagtgtttgtgagtataaatggaccgtatcaccaagtcagggagcgagccaatctccttctcgtaatacaaattatataacattctcgattccgggcagttattatatagcgtgtcgtgcttatactactcagtgtggggcggcgggctctgcggcatcaacaactgtatccgtgcaaagctcttatatggtttattctgatggatccagtaaaattgtggatgtcatagaaaatcaattagagaatgacgagtcatctattttgtctgatgtggttgtttcaaatcaagtctcttatcagctatataatcaagcgacaggcctattagtcgctgaggggaaaatggaacgaagcgggggtacgcttgattttaatcaagtgaattccggcatatatattttaaggatacaagtaagcgatgcgatttttgaggttcatagagtagcgttcaaataattgagatacttgtagagcccctatctcttttatttaataggagataggggctttttcattttaagatagattaattagcgtatatatccttatcgttcacgggatttttccctatttttgtccctcaattgaaatgagagtattgaatggaagataaatatgtgagaaatagtttacggttctttataggggtacttctgctggtcgtgctgtattcgtgcgcgaatatagcctcgccgaacggagggccttatgatgaggccccgcctaagttcgtaagcagtacgccgttgcctaaccagataaactataagggaaagaaggtggagattatttttgatgagttgatccagatcgataagcctaccgagaacgtgatcatcactccaccccaaatggagcaacccgttatccgggcgaacggccggaaggcggtcatcgagctgatggatacgttgaaggagaatacgacctatacgatagactttaccaattcgatctccgataataatgagaagaatgtattggagaattattccttcgcgttctctaccggcgaatccatcgacagtatggaggtgtccggagtcttgctgaacgccgagaatctggagcctatgccgggtattacgatcggcgtgcatacgaatctggaggattccgcctttacgacgatcccatttgtccgtacttcccgtacgaacgacaagggagagtttacgattcgtaatatggcccccggaacctatcggatctatgccttggaggatgtgatgcgctcctataagtacagccagcccgggcagcagatcgctttttacgattccttgatcgtccccgcgttcgagttgacgacccgtcaggatacgatttggaaagatagcttgacgatcgatacggtgatgacagtcggttatacccatttcatgccggacaatatcgagttacgcctgtttaaggagaaagtagagcgtcaatatatgttgaagccggagcgtacggatgagaaaatactaaccttgcgtttcaatacctccttggatactattccggtaccggttcctttgaatttcaccccggcggatagcaattggtatttcttgcagacagcggaggaaggaaaagccgtgcattactggttgaccgattctttgatctggaagcaagatacgctgcaagtggaggtgaattacctgaaaagcgattccatgaatatacttcgtccgcagaccgatacggtacaatttaccatgcgtcgccgtcctgtggagaagaagaaaaagaaaaaagacgatgagccggaacccatcgagtttctgggaatgaacgtaaacgcttccggttcgatcaacctgtatgatacggtcgctgttacgtttagcgaaccggtagcggggttaacgaaagatcatttctatctggatcagaaagtggatacgctttgggaagccgtagacttcgatttctttccggatacgacgaactctttgaacttcttcatcaagcgcccgtggaagtatggagaggaataccgtttggaagtagactccgccacgatattcagtgcctatggtaaatggaacgatgtgtatagcggggaattcaagatcaagaaggaagatgagtacgggcatttatatatcaatattgagggagcggataccaccgctttcgtggaattattgaatagcagcgaccagccgatccgtaaggtgaaggtaaaagatggcggcgtgcttttcatggacttgaaaccggataaatattatgcccgtttagtattagacgtgaatgataacggtgtctgggataccggtaattacgccgataaacggcagccggaacttgtcttctattgcccgaagatattcaatatcatgcagaattggcaagtggaggagacttggaatatcaaggctacaccgatgaaacggcagaaaccgatcgatatcacgaagaataaaccgaaagagctaacgaaaaagaaaagagattacaaaaatgagggaacacagtcttcgtccaataggaacagcggtgtgggcggcttgcgcttctaaactgtatatatgcgttttctttttgtgtgtagcgagtcttacgtctttgcgggcacaaacgttgccgttatcccatggggaacgggtggattacgatctttatttcaaatgggggctgatcatgtcgaaggccggattggctaccctttccgtgaaagaatcggaataccaaggagcgccgtcatggcattataacctgttgttccgctctgccggcgtgatcgagaaagtcttcaggatgcgtgatacgatggattgccattactcaaaggagcctcggctcttgttcagctcgaagcgcacgaacgagggagactactatctggtggataatctccagtttgagtatcaaggaagcggtaggatcgatatccactcgcatcgccatacattaaaggagacgaagatcgacacgatgctaatggcgaaagggcgtgtattcgatatgctgggagctacgatgtatctccgttcgctggattggcggacgatgagttatggtgcggagttccctttcatgatcgctatcggccgggagctcgtgaacgctcgtttccgctatacgggacaacagatcgtcgagcataaggaggcgaaattccgtacccgtcatttctatatcgatatctacgatgaggcattttcccaagccaaggaagcggcggaggtttggatcggtgatgacgagaaccatatcccggtaaagatccgggcgaaactgaagatcggggcggccgaggtctattataaagactcctataacctgcgtgccccgcttacttgccgtatcgtggtgcagaagaaatgaaagctttttagataggcttgtgtttctcgcacccagctcatcacggagctggggcgagagctttttatagaatttcttttttaaaccaacggagtgaagggtaattccgtgtctttgcggtaacctgtaccattaaaagtcgcgattaattcttcggcttcattggtgatacggacttcgcaattcgccagtctcttatggctgaacgcttctttcgcttccgcatataagtatcccttactctccgccttaaagaaattgatgtttgaggtaatggataatgtcaggcgtgcgtggctattagtcgccgcggcgaaagccagatccgccaacgtgaagatcgccccaccttgacatacgcctccaccatttaaatgttcgggcttgatgagcatacgcgccttggcgtaaccgttgcccgtttctaataattcaacgcccgcaagcaaggcgaatttatcgccttgaagaaattcatggattgtcataacctcttactattcgcttggtggattatttgcttagtttccattccgcaccatccttggtatcctttatctcgaatcccatcgcggttaattcgttacggatcttgtcggaggtggcccagtctttattcgccttggcttgctggcggatggataataataagtctacggccttgccaaaagtctcatagctgttaccaccggcggaagcctcgtctttcatacctaggatgtcgaacaagaacaagtggaatacctcttgtaattctttcaggtcctcctcggttatggtagccttgccgtcttttatcgaattgatcgcacgggcggcatcgaatagatgagaaatcacgattggtgagttcaaatcgtcattcatggcctcgaaacatttctcacgaagacctttcgtgtctacggtagaggtagcggacggctgcaacttcatcaaatgtccgtatgcctccatcaagcgtgacaagcccttctcggcagcctgtaaagcctcgttgctgaaatcgaccgtgctacggtaatgcgcttgcaggatgaagaaacggatggtcatggcggaatacgcttgttgcaaggagggatgatcacccgtgaagaattgctccagcgtgatgaaattacctaatgatttacccatcttctgcccgttgatggtgatcatattgttgtgcatccaataatgaaccatatcatctccttgggaagccacggcttgtgcgatctcgcattcatggtgcgggaagatcaagtccatgccacctccgtggatgtcgaaatgctccccgaggtatttcttgcccatagcggtacattcgcagtgccaaccggggaagccgtcgctccacggagacggccaacgcatgatatgctccggctgggcgcatttccaaagggcgaagtcgatggcgttatgcttctcgtcctgcccgtccaacgcacgggtcgtattcaacatatcctcgatattgcgacccgagaggatgccgtatttatgatctttattatatttctctacgtcgaaatagacggagccttgactttcgtaagcgtagccgttatccagaatcttcttgactaactcgatttgttcgataatatgtccggaagcgtgcggctcgatgctgggaggaagtacgttcagcgcatccatcgcttgatgataacgattgaggtaatattgaaccacttccatcggctccaactgttctagccgtgccttcttggcgatcttatcctccccatcatcggcgtcgtgctccagatgccctacatccgttatattacgtacataacgcactttatatcctaggtgggtaaggtaacggaatagcaagtcgaacgtgatcgccggacgtgcgtgtcccaagtgggcgtcaccataaaccgtggggccacatacgtacatacctacatgcggctcgtgcaggggtatgaattgctccttctttctcgtaagcgtgttgtaaatattcaatggatgttccatattctattatatatttaggaatcgcgaacttacataaaatccttggtattatcaagctgatcgtgaatagtctgtagttttcataggcattcattgactcttgatgacttccgacggattctcattggctgccttacatacctgttcacgtatcgtacctagaaccatgctggtaatggtgatgaatattcccaccaaccaccagatctggatttggatgcgataggcgtagccttgcaaccagtagttcatgacgagatagctgatcgggaaagcgatgattccggcgatgacaattaatcgcatgtattccttgaagaacaagaaaatgatctcggaggctttcgagcctactactttccggatagcgatctctttacgccgccgtttcgtggaggctgtagcgacggcgtagatgccgaacaaggagattagcaaacaagcgaaagcgaggaacgagaagatcttcagcccgacgatctcggattggttcagttgatcgtaaagcgttccgatcggggtgagttgggtgtccgctaatgtcgggtcaatcttgggcagtagctccgtgatacggtgggtgacgtttccttcctcacccgctacgacccggatatacaaattattcaccagtccgcccgaaggaatgaatagcatcggatgaatgctctcccggaaggatagcgcatggaaatcgttgacgacaccgacgatttcgtattctttgatcacactgaaatcagaccaccacggcatacggatgatactgccgaccgggtcttgtaagcccatggctcgaaccgccgactcattgagcacgacacttagttcgttgccctcagtccaccacctacccattaacatcttcaggccgaaggtctcaccgaaccggtgatcggttccatagaggtggaagtccacctttgtgtccagcggttttccctcccattccacattcgtgaagatcgccatgggatcgacatgatgttgaggcttaaagttcgtgtcggtgaaacttttgacctgcggcagggcacttaactcttgcatcaacgtggattctattttcccggatacgtctacgaagccggatagttggataaggccttttggatcgaaacctaaatctttttgatttacgaatcgcatttgctccatgacaaccagcgatgctacgatgaacaggatactgatcatcaattgtaaggtcacggccatgcggcgtaacaaaaggggtttgactgtctctttgggaacgagcgaggtggttgccgtatggctgaactgcccgaagaatactaatcctgcacattggaggatgaggaatgtacctatacctacccctgcgaaaagaaacaggaaccggcccatctccaaatcaatctccagccatcgggcgaaaagcggcttgacttggactatgaagatcaaggctaccaacaaggatgcaagtacggaacagcctagctcgacagacatttgttcgatcaattgctttctcgttgcgccgttgaccgtccgtaaacgccattcccgcacacgttgccgaaagagatccatataggaattcaagaaattgaagagggcggcaaacaataatagggcaccagatacgacaaacaagccgatgaaatttaaggtaaagggtgtatcttcattcagatgatgccggatctcacggatggggagtgttcgcaactcgatctccttgttcaccccgatacgttcaggtagctcttttagttgattggcgaaggcttttgggtctgagcttggatggagtttcacgtataagtccatcacgaagaagctccattgtgcctctggaggtaactgggagaaatgctgtatcatgttatggttgatgatcgcgtcgaacggtagattggtatgggttggtgggtctttcaccacagccgtgacgatgtagggaggtaaggaggctctcatcaaggtgtgtataggttgcccaatcgccttttccgcgtcgccaaatagacggaccgccgtacgttcgctcaagatcatgttgtttacgatttgtagcggatgattcatttctccacaaacgaaagattgcgggaatacctctaggaacgtgctgtctgtataaagcatattcatttggatataaggagtcgcttgggtacggcagttttcgggtgaaagcataagcgtggtggaggcttcgatggctgggacttgctctcgtaggctattctcgatacctttcgaggctcctttgttcactttaccggattgtttctcggtgctatagacacggtagatggattcggaatccttgtagaaagaatcgtaagtggtctcatgatccatccaatagagtatgggcacgaaacagacgagggcgaaagccagccctaggatactgatggaggcgctgactttatacttccagatgtttttgaaggcaatgacacagtaatgtattaacatggcaattccgttttttgatgatatcgctgatgactcaatttcgctgaatccgattcaaatatcatgccataaatgtaacgtattagaaaatagaatcatagaaaaatctgtatttcttcatgtagtgcgatagcgtacattttttgtgcgataatgcacgtacaagctgtctttattccctttatctttgtccgtatggaagaaaaaggaaagatattgatcatcgacgataataaggatgtgttgttcgcattgaacttactgttggagccgtacatgcaaaaggtgaaggtaacgacacaaccggcacgcatcgagtatttcatgcggacgttccaaccggacgtggtcttgctggatatgaatttccatcgggatgccgtgagcgggcaggagggttttgagtatttgggacaaatcttggagatcgatccgcaggcggtcgtgatcttcatgacggcctattcggatatagagaaagcggtcaaggccattaaggttggcgctaccgatttcatctccaagccgtgggaaacggagaagttgctggctaccctctcgtcgggcattcgattgagccattcccgtaaggaggtaggacgtttgcgagagcaaatgaaagccatgaaggaggacgacacattgccggaattgatcggtgagtcgccggctatgctgaaggtaaaagacacgatctacaaacttgtggagaccgacgcgaatatattgattaccggtgagagcggtaccggaaaagatctggttgcccgtttgttgaggcattactcgccccggcgtgacgatgctttcgtgacgatcgacttgggaagcatcccggaacaattatttgagagtgagttgttcggctatgagaaaggtgccttcacggatgcccgaagatccaagccgggacgtatggagatggcttccggcggtacgctctttctggacgagatcggtaacctgtccttgccgatgcaatctaaattgctgacagctatagagaaacgtcatatcacccgtttgggagcggtggaaccgatctcgatcgatgttcgtttgatctgcgccaccaacaccaatctgcgtcagctggtgggcgaggggagtttccggcaagacttgctctatcggatcaataccatagagatagccataccaccgctgcgtgagcggggagaggatatcttgatgctggccgatcatttccagaggctgtatagccggaaatacaagaaaacgatcaaagggttgagccgggaggcggggagtaagctgatgaaatacccttggcccggtaatgtccgggagttgcagcatgttttggagcgagccgtgatcttgaacgagggtacggtgctgagaccggatgatttccctctctatacagcctcttacgagcggaagaaggagctggaccctgatttgaatctagagcaagccgagcggaaaatcatcgagcgagccttgcggcaaagcaatggtaatatgagctatgccgccgagctattgggtatcacccgtttttccttgtatcgtaaaatagagaagttcggcttatgagatcgtatgcgttcacggtcatctcgcacatcgtaggcatcgtcttgtctacgggactcctgttctattgcgtgcatgaggagattatcttttgtcctactttttgcgggatcgcgatcttgtatttctcgattcatctttatttcatacagatgcggcaggtgaagtattggcgttatgtggtggattgcttgcggcagcaagacttgatccagatcgttcgttcaccttacgaggataaggtgatgcgggagttggcggacgatttgtccgcagccctgcgatccttgcgtggccgattgatggacgaggaggtgaggcggcagtattttgagagcctgttgaataaggtggatacagccgtacttgttaccgacaaggaaggggctattgaatggaagaaccggaccgccgacgcgttgctggatacgaggtgtcggttacccaatgagtttttggaggctatcaaggcggggaagacggtggtgcgttacggaaaaccatccgttccgcaagattgggcgatcgatgccactcgtatcgacttgcgaggttgcgagcgttggatcgtcagcttgaagaacatccattctaccttggagcggaatgagatggaggcttggcagaaattgatccgtgtcttgacgcacgagatcatgaactccatcacacccgttatctcgttgtccgagaccttgagcaaacgttgcaaagcagatccggatgatgtccggaatcgttcgtatatccagcatggggtaaatgtcatccatcgccggagtaaagggttgctggatttcgttgagaattaccggagattgacccggatcgcctctccggtaaagacccgtatcttagtgaaagatttcttttcggatttagggcgtttgtgccctgagccttctatccgtttccgcttgccggacgagcctctggaatggttcgcggatcgggcgcagatggagcaggtcttcttgaacttactgaagaatgcttgtgaggcttgtgcggaaaagtcaaaccccgagattatcgtggcggctcagcaggagggaaacgaactcgtctttaccgtgcgagacaacggtatcggtgtcttacccgaggtgatcgaccgggtttttgtacctttcttcaccaccaagccctccggctcgggtatcggtttaagcatctgtaagcaaataatcaccttgcatggcggccatatctcggtagaatccgagaatggaaagggtagctgtttctttttgtactttaattgattatcagtctattgcagtttttctaaatttcttatacggaaaactttagtttcttcaaggaaaaactttcgtttctatatagggaaacaaaagtttcttactgaggaaacttttgttttattaggagaaaactcaggctgctattataggagattcgtgataggattcatgagacggaaagttgttgtctgtttttagtgcgcttaccctgtaaaatacataccttcgcggatatatttaattgattttctatgaaatggtatctatggggggcagttgtcctgctttattccctgtttggaagcgcttgttctacggaagggaggtatgatttgtcggcttatggtttatccccggtcgagaatgtggataatgcgcccgctatggcgagggcattggagcagatacgggagaaatgcgaggaaaaccagaccattgtggtgaccttgcctaagggccgctatgagttttatcccgatagcgcggtggagcgtgtctatttcatctcgaatcatgatcaaatgaatccgaagaaagtaggtttgcctttcgaggggatgaagaatatggtgttcgacgggcaaggctcggagttaatcttccacggcaggatgttgccggtctctttgctggattcgaggaattgtgtcttgaagaatttcagtatagacttcaagcatcctcagatttcacaggtaaaagtggtggagaacgatacgctgaaaggcgggatcaccttcgaggtggctccatgggtacgctatgagatacgggatagcgtgtttgtagcgaagggagaaggctgggagttgactcccggttccggtatcgccttcgagggagatacacgtcatttggtgtataatacaagcgatatcccggtaggcgtgcggggcttgatcgaggtttctccaaggctgataaagtctccccgttggaaagacagccgtttggtgcccggtacggtgatcgccatgcgttcttgggaacgtccggctcccggtgtcttcctgtatcatgacgtgaatacgactctggagaatatcaaggttcattatgccgagggaatgggcctcttggcgcaagtgagcgagaatatcacgctggatggtttctctgtttgcttgaaaggggcggacgatccgcggtatttcacgacacaggcggacgctacccatttctcggcctgtaagggaacgatcatctccaagaatggcttgtacgaagggatgatggacgacgctatcaatgtgcatggaacttacctgaaagtggtgagacgagtgaatgactctaccttggtaggccggtatatgcacccgcaatcgtatggtttcgaatggggaagggtaggggattccgtgcagttcatccattcgagcaccatggaattgataggggcgagaaaccggattaccgctatcaaggcagttgatcaaccggattaccgaggggcgaaggagttcgagatccggtttgagaatacggtgaatccttcgatccatgagggaagcggcttcggcatagagaatctggagtggacgccgacggtcctattctcggataacgtgatccggaataaccgtgcccgcggttccttgttcagcacgcctcggcaaacggtcgtagagaataatgttttcgatcatacctcggggacggcgatcctgctgtgcggtgattgcaacggctggttcgagaccggcgcttgccggaacgtgttgatccgtaagaataagttcatcaactccttgacgaatatgttccaatttacgaacgctattatctctatttatcccgaaatcccggatttagcgtcgcaaaggaaatatttccatagtgatatcgtgatcgacgcgaacgagtttattacgttcgataggccattggtatacgccaagtccgtggacgggttggtcttcacgaataatattgtcaaacaaaataaggaatacccagccttccattggaataaccaccgtttctatttccagcgggtgatccattcgaaaatagagaacaactattttgatgaagggtttatccgggagagggatgtcttagaggaaaataacggatatgatatataggaaattaatcgtcttggcaagccttttgataggcttcgtaaacattgcgttcgccggcgttggtgatctcgatacgttaaacgtacgttctcaagcccctgtcaaggagagaatgcctgtcgtcgcctataagtttaacccgaaaagcttgattcttccggcctcattgataacggtgggagccgtaggcacggcgatcgacgggatgaatgactttcacctgttttcacggaaagattccgtgaagcaaatccatatcgacaattacttggagtggggaatgctcggttgggtatttgtctgcgaccttatgggaaaagagaagcataactgggtggaccaactttgcttggtcgctttagcggaagggatgaacggattgatggtgcatgggctgaagaactgggtaaacgagcctcgcccggacggggcgccttattcgtttccgtccggacatacctcgaatgctttcttaggggcgcatatggcttataaggaatttaaggatagctcgcctatactcgcttactcgggttatgcgatagcggcgttcgtggcgggttcccgcttatacaataacaggcattgggtggcggatgtagtagccggcgcgggtttcgggatcttgtcggtagagttatcgtatctgatctatttcccgattcgtaacgctatcgcccggcggatcaatcgaaatgtgaagaactgcccgatcgtggccgctccggtattcagttcgaatatggcgggattctatctgacttatcaattttaatgcgtcttatggatcaagcgcatgtcggcttatagagactggttgatgcgcaaaagctcctctatatgcgtgcggtcgttgctgaggcgtggaatcttgtgttggccgcctaatttgcctttctgcttgagccattcatagaaagcgccgtcgcgggcgataacgatttccagcggttggagggagatctctttataccgcttcgcctcatagtccgagttcagcttttgtaagttctgatctaataaagtggcgaattcatcgagagattccggtttcttgtcaaactcgataaaccattggtgccgtcctttcgccttatccagcataaaaagtggggcggcggtatattcttttactttcgccccggttcgtaggcaagtcatggcgatcgccttatcggcgttatccaccattagctcctcgccgaaggcgttgataaagtgcttggtacgtccggagataacgaatttatgagggaataacgaggtgaaacgtaccgtatccccgatctgatagcgccataatcctcctgaggtcgtgatcaccatcgcgtagtttttcccggtctctaccgattccagcggtaacacggtcggatgggcgctacccacctcgttcatcgggatgaactcatagaaaataccgtaatccggcatcataagcaaactggggtctgtcggatcgtcttgcagcccgaagaagccctcggatgcgttataggtctccatataatgcatcttatttgatggaatcaaggttttatattgctcccggtaaggctcgaaactgattcccccatggaagaagacctccagattaggccatacgtccgtaagatattccctacccgtttttttcaatacggccttgatcaataccaacatccaagaaggaacaccggataggctgtttacatccttattccaagtgttctccacgatcgccttgatcttgctttcccattcatccattaggataatgggtttcttggggacgcgtattaaattgacgagcggattgagattttgaagtaatacggcggataagtcgccttgatgagcctcggagtttagcggagaagggctatggctgccacctaaaatcaagcctttcttggagaagaaacggctttccgggttgttccgcagataaatggctacgcaatcaaagccgcctttatagtggcaaccctttaatatctcgggggtgacgggcaggaatttacttttgtcgttcgtggttccgctactcttagcgtaccaccgcaccaccgaaggccagagaatattcctttctccgttgatcattcgggtgacatacggctttatctcgtcataagtctgtaagggaagacgttggcagaagtctgaataagagcgaatgcttttataatcatatttgagtccccattccgtcttgcgtgccgtcgaaagcagagcatgcagctgtttgcgctggatatggtctatatcctgcccaaatcgtccgatctccgtttgtcgatggcggaaaaggagcgaaatcgtctgtgttaaaatatccatgccctttttatttgttcgagtgcaaatgtaggcattctctttttatttatatctttgctaagtactaaattaacgttacgatgaaaatagggattctctcatcgggtggcgattgccccggtatcaacgctacgatccgtggtgttggcaagaccgctatcatgcattacggcatggaagtgataggtattcatagcggttttataggtcttttgaataaagacgtccaagttttcgatgaacggagcttatccggcatattaaatttagggggaaccattttaggaacgtccagagagaagcctttccgtaagcttttggcctcgggagattcggaaaagccggagatcattaagaaaaattatgaggagctggggctggactgcttggtttgtatcggaggaaacggtacgcagaagacggccaatctgttatctcagatcggattgaacgtgataggcgttcccaagacaatcgataatgacatatggggtacggatattacgttcggttttaataccgccgtgaatatcgccacggaatctatagaccgtcttcattctacggctagttcacataagcgggtgatggtcgtggaggtgatgggccatcatgccggatggatcgccttgtatgccgggatggctggaggtgccgacgtgatcttacttccggaattgggatacgatatcgataaggtgaacgaggcgatcttggatcgggctcgcaggggcaaaccttattccatcgttgtagtagccgagggtatcgagactccggataaaaagcgtccttctgattatatcacccgggctatcgaggcgggaacgggtatcgagacccgggataccgtattgggatacacccaacggggtggaaacccctctccgttcgaccgtaacctcgctacccgcttgggaggccatgccacggaactgatcgctaatggtgaattcggacgtatggtttgtataaaaggagatagggtagaatccattcctttgttagaagtagcgggaaaactaaaattagtgacaccggatcatgatttgatcgtacaaggaaagcggatgggggtaacattcgggaaataaaataaaaaaggttgtgcgttctctgacacacaaccttttttactttatactagtaggcggccgtttatttcttaataccttgaacggtttggcttcccttttcggtagtcaagcgaaagatatacattccagtggcaaaatcacccgtgctgagactgcttcccggttgcgggatgctacgtatcaactttccatcggccctgtagatctcaagcgatttcagttgttgataattctggatctgtacttcattcgagaagatacgtggttgaatgtctacttcttcgcctgttggcttcagttcgttacctacgctcgtttccggaattaccgtagccggagcgctctcgtcggtaccataaagtgccgttacttggagcagaggggtatttgttgccagatttttcaccgtataattccgttgagaaacaggtaatgtcgtcagttcccgagtatcttgatataccttataaccggtcagctccggaaaagccgtaatcaactctgcttcttgcgcatcggaggcgatagccagtttccggaatgataatcggcccgttctcatgggttgcggtttctccgagaaagtgctcgtggagaatacggaacttgaggggagctcaccttcttccgcgcttattacgatcgataacacaacattggcatctagctcatcatctgagaatgtttcccatttttttccgtccaaagaatataaattcccttttccatcgactgcggggccttcatcggaacatgccgggtatgtgttattggcatagcttatcacatgaatggctaccagtaaatcctgttttgcgtcgattacgaatggtgctttaagtgtgaccgaatttattttacctgatttcagttgagtgaaactctcttcatactcccggtttccctgtttgatatagactccataggtgactccttcctgcggatagaaattaaccttccggatcgtttttttatgcaccggttgtagatctttcgtatcccatttctgagcgaaatagaatggatctcctccgagaccgaactgttgataacgatcttgtgatccccaaccagctattttttcgaggactggggcattccatgtcagttgaatctcacccgtggagatctgtttgtatttcaaatcagtcggactttcatactcgtttccgatcgttttcccatcctgcgtcattccctgcaacgaggtgacgcccattccgagtggatctagccagacatccatccgggctgtatcattatcactgtatttattccagtgataatacaatttaccgtataaattcaatccttcgggcagttcgcaactggagcttccaccgctcagcgtacctataatcaagcctttgctattaaataaaggcgagccggaagaacctccctcggtcaccccgtgtccgtttagcgtggcatcgaaagtcgcgttccaatgagcgttcgtggccccgtttttcccaacatcactattacgccatgtaatcgattctgtcggataatttccataggtggagattttcatataatcgccggaaggatgatggatgcctacgcccgagagtgaaagcatatttgaacgatcccatccgttaaagaatacattataatcgtcggggatctcgtcgttaagcaacagcaacagtccgtcggaaccgttttcgacaggggtagaggctttccgtgtacatcctaccatggtttttatcggataaatgggtgactcattatcgcagcccacatgttcttggtggaaataaaacaaccagactgctaattcctcgggagtaaccgtctgttcgcccagcatatcttgcgaacaatggaaggcggataatacataaggctttttgtcacgggccgtattatttaccagagaagccgtacaaatatagcttcctccttctccctctttattacggatgtattgaatcatttgtatcacccccttcttttgctcctgccaatcggctccctcctcgcaattgatattcacttcgcaagcttctgaaaagccggctcccggcgcttcctgtacttctggcatgatcgcttcaagatgattatacccgtaaccgacctcccggatgcgtagtcgaggtgtctcgccggatggtgccggtacatattcgaggatcacctcatcgcctgctacggcttgggttgcgaacggtccgttttcaggatgcgtacgatgcgtataggcacccaatacttgggttttcgctgcgttatacaggtataaccgggcacctttggggatataaaaatcggagtaatacaggatcaaggcgatcgctcctttcgcttgaaggtgaagttgccatacttggctgccgtcgggcagtgaaatccaatcgccactatcggcgatgtcgaagctggttgggatcgacttggctacacgcaacggagcgccttggctgaccctccacgcatcgaccgtctcgaggtcttccacactgaaattcactggaacttgttctgctagcttttcacttcgaagtgaacctgcgaattgaaagctgggggggagtcctccttcgctgatctgcgccaacgaacttgaaatcgagaaataaccgatacataacatgccggttattaatattcggagaaatttactgtactgttttttcatacatacaactttatatgagcttattcttatatagctaagaacttgggtatatcaaacgatgtacccaagttctgctgtttatcatacagtttcttcctctgggaggtcagaaaactctttttcatcggttagttcaccagtcttctttttctttgtggcagagatacgttgctggagttctttgtctgtccgcaatcttttgaccgccattttagaagccgcttgctgggattcttttttggagtaaccgatacctatgccaatttgctcgcccagcaatttaatcgcactttggaatacaggattcccatcatgatccgtaaaagactctattagatcgaacgagatcgatattttgttcttttggctccattcaatcaagtttgacttgaaatttatctctttccggacgagcatatctacatcgatatacttttctatcatcacgtcacggataaacttataacaaacgtcataaccttgatccagataaatagcgccgatcaaagcctcgagcgcattaccatacatatgattgttatgagagtttatcttggttgaatagactaccatttgatcgaggccgagttgtacggcgaccttattcatcgtttcccgttgtacgatcttggagcgtgtgtttgtcaaaaagccttcccgcttatttgggtagcgcttatagacaatatcggcgaccgccgcatccaaaattccatctcctaaaaattcaagacgctcattgttaagccatttaccatcacccgtctctaccgatgatgatttatgcaacaaggcctgctcgtaaatctggagattatccggataaaaacctagaatctttgataaagacaaataaggctccctacctttattatgcaggagccttattcttttatgtagctgtttgtatagctttctaaacacgttatttcacgaattttttaacaatggcgcaagcgttgtgtccaccgaaaccaaacgtattcgataaagcggctttcacttctctcttttgagccttattgaatgtgaaattcagtttataatctatttcaggatcatcgtcgccttccgcatggttaatggtcggcgggataataccatcgtttatagccataatacacaggatcgcctctaccgctccggcagcaccaagcaagtgaccggtcattgactttgtggaactgatattcagttgataagcatgttctccgaacacatctttgatcgccttaacctctgagatatcgcctacgggagtcgatgttccatgaacattgatgtaatcaatatcttccggagccattccagcgtcttccaatgcgttgcgcataaccagcttcgctcctaaaccatccggatgagaagcggtcaagtgataggcatcggcagacattccggttcctgcgatctcgcaatatattttagcgccacgagccaatgcgtgctccatttcttccaataccaagcaagctccaccttcacccatcacgaatccgtcacggctagcgctgaacgggcgagatgcggtctcgggagaatcattacgtgtcgataacgcgttcatggagttgaatccacctacacccgattcagaaacagcagcttccgctccaccggtgatgatgacgttagccttgcctaaacggatataattgaatgcgtcgctgatagcgtttgtagaagatgcacaagctgagacggtcgcaaagttcgggccgtggaatccataaagcatggaaatatgtccagccgcgatatccgagatcattttcgggatgaagaacgggttaaacttcggaccgatcgtatccttgatcttcgcataactcaatacttcctcgtcaaatgtcttgataccaccgatacctgaagcgaaaataacgccgatacggttcttatcttctttatccaagtccattgccgcgtcctcgatcgcttgtttcgccgcatcgatcgcgaataagctataacgatcacacttgcgggcttccttacgatccataactttcaacggatcgaagcctttaacttcgcatgcaaattgtgtcttgaatttggatgcatcaaactgagtaataggtccagcgccactttttccgttgataataccttcccatgtttcggggagggtattaccaagaggagtaatagctccaagacctgttactacaactctttttaattccatacctttagttaaaaggattgattacttcgcgttagcctcgatgtaagcgatagcgtcacctacagttgtaatcttttctgcttgatcgtcaggaattgagataccgaattctttttcgaattccataatcaattctacagtgtcaagagagtctgctcctaaatcgttagtaaagcttgcttcgtttgtaacttctgtttcttcaacacttaacttgtcaacgatgatagcttttactctttcagcaacttcagacataactttttcaatttagattaataaatacgaatatactttttaaatttgcagtgcaaagaaaagaattttttatgttacaaagcaaatttaataagctaaaaatgcggaaaactgcacattttttcttttcttgtgcatttaaacatctgaaaatatgaaaaacatagcgatttttgcttccgggtctggtacgaatgccgagaacatcacccgatattttgctaacagtgaaaacgttaatgttgcggttgttttatcaaataaccgtaatgttggcgtgcatgggcgggtaaacaagttgggcgttccctctttcgtattctcgcgggatgagtttgcggcgggtacgcctatcttggagaaactggcggaatatgacgtttgctttatcgtgctggccggtttcatgaataagatctcggacgtgattcttcaggcttttcccggaaagatcgtgaacatccatcctgcgttactccctaaatatggcggcaaggggatgtatggcatgcatgtgcatgaggcggtcgtgaaggctggtgagcgggagtcgggtattactatacattatattaatgagcattatgatgagggcgctatcatcttccaggcttcttgcccggtattaccttcggatacgccagatgaggtagccgcgaaagtgcatgccttggagtatgcgcattatcctcatgtgatcgaaagtttactgtaaggcttttttgtcattagcctacttgaaaacctagtttttggagtacggcgaattcttccgggtcagctttgatcgcttggtaagcatggaactcacggggatgatcatacgctgccctaaatcgctcgaaatgatgaggattcgctcttagtgcttggtcgattacttctgggttgaaacttctcaagatggcttcttccacacggtgctccttgaattgtcccaagtcgatgaataggttggttggggcaggcggaatgacttccttgatcttttcgatacggataccgaaaaagcatcctatattctctaggcacattcgtgtcccgttcgccttcccgtcggcggagaaaccggctatatgaggagtggcgatcgtggcttccgacagtaattcccggtcgatatccggttcgttctcccagcaatcgatgatcagttcgctgaccttgccggttcgtttggcctgcaataaggcctgcgtatcatgtacggcgccccggcaactgttgataaaccatggttttcgttccaatttgtcgaaaaaagcaggatcggcgagatggcgggtggcgaaacgtccctctttggtcaacggcacatgcaaggttatgatatccgcctctttcgcgatcgtgtccaaggatacgaatccaccgtcgccttcctgctcggcacggggcggatcattgcgaagcacacgcatccccatggcctcgcatagcctctccacgatactccctacatggcctacgccaacgataccgatagtcttccctgctagtctctctcctttgcggagggcgacggctaccaaagaggataatacatattgccccacggaagcggcgttgcaacccggggcgttcttccacgtgatccctgccttctcgcaataatggatatcgatatggtcgtatccgatcgtggctgtcgtgatgaggcgaacccggctaccttccaatagctcgcgtgtacatttatctatgctacgtacgatcaaggcatctgcgtcttttatgttcgtgggtgtaaactctttggagtcaaggtaggatacgtctgctatcggctccaagatcccttttaggtaaggaaccgtgttatctgctattattttcatcttatcagcttgattatcgttacgcgatattaagtaaaaaacaggggatatacaagtgatgatggcttcttgtcgatttctatatgcgcttttgttctcagccgaaagattcgggaaaacacgtacgagtttcatccaaaacacgtacgactttttgaaaaaacatgtacgtgttttgacggaaagattctcgtgtttttttttgacgctgattcttagcttcttacgtgcgcagctcatgagtaggcttattgtatggaattaaagcttctcggcttaactaaaacggatagattaatggaagagccgtgcagtacttatctcagcttgtaccgattgaaatgaggccctgccttgaacaagaagaaaaacgtagacaataccgtaaggcaagcgccggacaggtaggcgtagttgaagccacccagctcttgtgcgatgctgcccccggccatcaacccgataccgatacctacatcccaactagttagatatgtagaagtggccgtaccccgctggttattgggtgccagattcacgaaaagcgtgttgaaagcagggaacatggttccgaatgccacgccttgcgagagggctatacctatgtagagataagaggaaaataccggattccaatgcatcaactccttgagcgccgcgagaagaaagaatgtggccgccgccaaatacatcccgagggagataacaagcgtgatccgtcctttatccacttgccgtccggagaacaggcgggagacggctagtcccatggccataaaggtgaaataaagtccggagtttacgctgatcccgatctcagcggcgtacatcgctacataagtggtagtcataccataaggaatggagagcaataatagggagatacccgcccaagttcccttcaccaagaaaaagcggtctagggagatcggttctcgtttgaccggttgcttataaggagtcttgaccatataggccatgataaaaccaaggcttccggatagcaacgagcaggaaaagatcacgtcgtatgtgaagttcccttgcatgaacagaccgatcatcggtccgaaactcatggcgatgttattggctaggccgtaatagccaataccttccccacggcgggaggagggcaagatatcgatcagtatcgtatttccggccaccgtcaccatgccgaaggcgaaaccgtgtacgacgcgtaaggcgataaagagggtaagcgccgtggctaccatgtatccgccaaatatggcggtgaaaatgaaataagccaccagatataagggacggcgggcgaaagtatccagtaaatatccggcgaacggacggatacagagcgccgctagcgtatagcacgacaagataaacccgatcatagacttcccgatcatgaattcttccttcagataaaaaggcaagatcggcaggattagatagaaagcgaaaaaaagcaggaaattcgccgctagtatatagcaaaagctgggtgtgacgatcttatcattattcatagagacgtgtcgtttataaatgacgcgaaattagatgaatttattgaataaaagggcttaaagtaagttttttgtacgggattgggaccgattgccgcaaatagttaatttaattcacatgtaaggcttttttatactcggtaggcgtcatcccgatcttattcttgaagaggcggtgtaaggcacgtacgtttcccaatccggaatcgagggcgatggcttctaggttgtaataaggatattgtttcattagctgtatggagtgttccatgcggaggttgctgatatagtttgtgtaattgtctcccgtgttgctctgtatcatccgggcaaaacggtttttgtccatgcggagccgttttagtacgtcctcacgggtaagatctgattttagatagagtttctctttatgcattatttcttccaacaggatgaaagaatcttggtcgattggttgatctgggtcagtttgtgtcttgctatctgatttgggaagttcttcttggtgcgatagttctgcctctttgtcacgttccttgatcgccaatagctcattcttgtaggctaggagttggtttacttggttcactgtgatcttgttctttcgcttgatgacctggctgttccggtacgagatccaaagcaagagaataaggaggattatgatgcctagagaggctccgagaaatgtgttgcgctgcttcagctccatttcctgcttgatgatcttggtttccttttcgttcgtctcataggcgatggcaagttccatggccgcgttttccttgtcgcgggcatacagttcctttcgtatgttggagagacgatcactgtattggagagctgttttatagtcccccattaaggaataggtattctttagcttcgctagcatcaccgtataatctttattgatggtatcttgcgccggagtcagtctctcccgttccaaggtgttatggatcacttgcttataatcatttattaatagcaggtaagggtccgctctcgttcttccctgcggcttttgggcgaatttggtggtgaggaacttttggtagtaactggccgctgcttgttcctctccgatcagttgatacgcttcgcaaaggaagctatataaataacctaggtgcatatccacccttgtctcttgcatgtcgcctgtttgttccatcttttccagaagtgcctctacttcctttccggtatttattgcttcttcatttttctcctggatcatgatgtttcgtagcttctccatataaagtgagatcaacgtacacttttcttccggatcggtggtgccttgtagcagttcaatcgcttggtcaagtgtctcgatagccttgtctttttgtgccagctcgttttgtgcccgtgagatggagatcatagaggtagcctcgacgctcttattgccttgggagcgtgcgatctgtatcgctttcgttgcgtattctatggcttcgttctggcgggatagctcgatatagcaattacttagtatctggcaaacattcatgtaggccgtggagtcgttttgtacggaatcggtgtggaatgcggctagagcgtattccagcgctttcttctcgtttttcaaccgggcgtatgcccgtgaccggatgatatgtgctttgtattccggtatgatccgtaggttctcggcgctatcggctaggtttatcgctttttcgggggttgcgatgatctgattgaatatggattggtaagataatttttcttgggggcggttatctgcggaagggtttgccgctctcaagagtacgatagaaaaaaagaataaagttatatatgttagtttcattcatttactttttagcgaacaaaaatataaatttttctttgatttataagtgtttttggtgacgattagatatgaaaagggcctagtttacctcgaatccggattatatgtcacactgtttttggactaaatgtcgtaaggtagcggggtttcttaatgaaagtccgcatttaaaagccttactttgtatcacaataagacagataaaatggcgcatttaaaatgtcgtggctggcgtgatgagacgagctttacgtcttaattgaaatataatggaaaagatggttaatatgaagagaaaatctattttgttatcgctgcttctagcgatttttgtggtaggagggatgtttgcccaagaacctacgtattccaagatgtctccctatacacgtattcttttagacaaattagcgaagaaagatacggcgaactcgttgttgaggagttctatctcgggagattatctctcggctttcgtgaaggtggcgacggatgagggatgggcttccttggattcggccgggtgccgtatccggacaaggacgggagatatcgctacggtgttgatccccctgtctgccgtggagtcggtgtctgggctgggttgtatccaatatgtatccgcttcacaacctatgagggccagtatggactcggcccgttactactcggacgtggcggatgcctatgcggggactaagcttccccagccttatacgggcaagggggtcatcgtgggtgtggtcgatcagggattagattttactcacccgaatttctatgacaaagagggtaaagcgtatcgtatcaaacaagtttgggatcaaacgagtccttatagtaaagcggaatacaggacggaagaggaactgctggatgcggcttgctcgtttgattcggatgtaaatacgcatggtacccatgtcgcgggcatagctgccggaggagggtttgatacgccctaccaaggtgtggccaacgagagtgatatgatcttggtggctactaccatgcagaattctgatatcgtagacggagtggactatatattcaaggagagcgagagactgggtagaccttgcgtggtgaatcttagtttaggggatggtattggaggacacgatggtactaattttatggatataatgttggaccgaatggtcggaccgggaaaaatcatcacggttgccatgggaaattctagggacatgccagtatataccgaactgatgtcgccttcggataccttgcgtacttttgttggcaggtctaatacgggtctttcttatggactggtggatatttgggcggacgagcccggggaacctttttctgtttgcctggatctgtatgatcgcgaaagcgatgagatattaaatactaccgggtttttcgccttggatacaatgcctaagtcttctgtttttactagtgagagcgtggatggcacgttggtgtatgaggcgcaaatggaatctgaattatatgtgtttaatgggagataccgtctttttattcagttcaattatccggaaggcaccaaaaatgaaaagatattcttacttcatgtggcgacaaataacacgccggtccgggcttggggcaacaatggcgagagcttatttacagacttgggaaaagggtatccttatacggtcggtacgggagatttcactgtcggctctccggcatcagccaaaaacgtgatagctgtcggggcttatgccactcgtatatgcccggtaaatgtagatgggggtacctcttatttggcaggtaatagtttgggtgagttaacatcattttcaagcgtaggccctacgcttgaaaatcgcatgaaaccagatataacagcacccggactttgggtggcatcctcctataactcattctatctggagggtgagatcggtgaaggagccaaggcatcacaggctcgctattccactttcaatggacatcgatatccatgggggtatatgagtggaacctcgatggcttgtcctttcgtgactggcagtatcgctctctggttacaggcgaatcctgctttatccccggatgatatcaaggatgtcttctcccgtacggctgttcaggataaaccgctctcttatccgaacaagcaatggggatggggaaagatagacgtgtataaaggtctgctggatatattgggaatccctacctctacggagaacgtattcgaggaggctccgcaagaggccgtgtccgtatatgctagcggtacgaaaggaagtttccatgtccgttgggcggaggtccccggttcgttcagcatccatgtacatgacgcttcgggccgtcatctgtatggtgagaaggtagattctccagcctcggtggattacgctgtttccttgggaaatgtccagcccggcgtttatttcatacggatagatacggcagagggtacggtggagcggaagatacgcctataacccggactcgtctggatcgtttatagctggtagcggatcgctaccagaaactcccggggacggatacgtacccatgaggtatagctttccaacgatgcgtatcgcgtgtatccgtaggtacgtttgtcgaacaggtttgtcgccgtggcggtgatttgcaaacgctgggatttccataagaccgagaagtccgcgaaaacggcgttgacggattggtcttcattcacgtcattgtgataatgatctacggaaaggcttgcctctatgggtgagaaaatgtaggagagttgtacttgttgggtgacgttccataagggcgccaaacgggtacgttctcctattttacttcctccgtaccggatatcggtttggtaactggtctcccaatggcggttgggagtccagatcactttgggttctaggcgcatgagacgatattgatagggaagcctttgtcccccgctgatttgctcggccttgctgatattgaggagcgccaggagcgaggtctttagccctagatcgtaaaagcctttggatagcgtgcttttgacggtatatccggaaccgtggttggacagtggtaaggagactcgttgtatctgtccgttctctatacgttgctcgtatatacggttgtaccactcccggttgtgtgtcaggtttaccgtggcgaagaattcccgtgccgtattcttgtactccccataaacggaataaagctgttgtctgtaaaccgggaggattccgcaattccagacgctattccggtaatccgtttgataaggccggtcgtataagtcggtcatctctccgtatctttccttataggaggcgtgtaccgtgaaacgccatgcgtaattcagtttgtagataatggacagggacggattaaccgagatgcgggagaaaccgacctctgtatatccggtccatctgagaggaacgctgagggatagggtccatttataggtattccattggtaatcgggtgagagataagtttgcaggcttttctcgatattgctgatctccccgtttatgcctaccgtatatcgctgggtgagggaaccactctttttcaggaatgagaaggaattatcggtataaaagttgcgtaagttcatcggataagggtggttatccaagcgaagatcggccgcgttgctgtggtaacggagcaaagactggacttccaacgtgtatttgtccaagctccacaggctccgtaaattattacgcaagtcgaggttcggggttttgatgcgttggttcaatgctgtacggccggtggaagccatgtttccggttatatgggaaaggctggattgccaatctccggtggctgaggactggttcttgagatacctttcctgcgagttgttttccactccgatatttaggttggcttgatccgagcgaatgcggctatcgctttgctccgttagatgaatcgtgtcctcggattggtaataggtcgtctcactccccctttcctgtgttcgcaggtcgtggatataaccggcgtttatacggagttgggtgttctcgttcagtttatataggcgatttgcggataggctgtgtatatggttgaacagccagcgctctttctttagcggggcggagaatgagggctgtagcagaaattggggaatcttgggctcggataaacgggattcgggtgattcggtaagcgtattttgctcgcccgatacatcctgcccggtattattccctttatatagataagcggattggcttctgcggctgatctgcaaggcgtcagcggctcctttccataagaacggggatgcgccgagaccgccttcggcattgatcagccagcgatcccggaattccggtctcagtttgaggttcaacgctacgtcttcggtcttgatctttctctgtaacacacggatcggttggtggttctccatcacttgtatgttctgtacggcgtcggctcgcaggttctcgctgatttgcttgtatttcccgttggtgagatccagtccctccacatagaaattacggatctctttcccgttgtaagagatcttccccagatcatcgatatcgatacccggaagtttccgtaatacgtccttgatggattgatcctttggggagagaaagcgggtgacatcataattgatcgtatcttgctgcccccagacacgtcccggacggatttccacctcctttaggctgaatacctgcggctccatctcaaaacgaagcgtttgtccggcatgtacggcttgttgctgggtttggtaccctaagagcgagacggagacgagaagtgagtccgtccgcttcggttgggtgagggtaaaggtcccttcattattacttaacgtatagttgatcggaagggagacgttgcctctagttaattgcacggtggccgcttctaccggcagttggctttccctgtcgatcacgatccctcggatgacggattgggcggccaatcctgccgggcagagcagcgtaagtaaacaaaaagtgtgtatatgcagtatgatccatttcatctttcttccctttctatagggttatacggcatgttcttgggttggtaaggtttcccgttatcgtcggtgacggtcactttcacctgtggcgaggtcaaggcgatgtatccgataggatcggcggcatatcgttcgtaaaccttttgcaggttcttgcggctgatcggctcgaaatcgtttcccccgaaaaggatcgggttcttatcccggctcagttcgatacccgtgcagatgaaagtgtaatgtccttggctgtcttgggcttttaggatcaggcccggtaatccgcataatttccaaggaccctcgcttttcggtatctccggcgtgtaccaagcctcataatgcctgcccttgaaatgacaggtcgctttccggcaaggataggacaggatggtcatcgtatcgggcagtaaggtccattccgggcgctcctccttttcctcgcagcgaaagcgactggcggcaagggcatccaaggtcgtggtctttcccgccggataattcttgtagacctgcgcgttggtcttggatgaatattgttgcaggtgttcattgatgacttcttgtgaggctccggcggctttgtcggcctctagtacggaatcggtgaggaatttggcgtaactatagtaaacggagcatttatccccgaccttcagcatgagggtctcttcctctttcttgtcgggttggagcgtgtccggcatggacgtggtctggtattgtaccgtgaaacgtgtctcgtcgatgggcttggctcttagtacgtcgtttaggttgaagatgttgattgtcacttgggcgttcgtctcgtgtcccgcccctgacagacctacgcaaagcaggccgattgtcgctatgattcgtttcatgatctgttggttttagaagttatttgtcgcgaatgtaagagaggaacgtttgccgtaaggaagatttttattactgaaatattactccgcttataaaaatggctacatgtacgttgtaatcatggagtagctatctatctttgccggaaaggaataagatatgggaaagaggattcgatggatatgggtaatctcgttggcggcggctttggcggcgatcggggtacaaggctattggctgttcaatcagttccggtatgagatgtgtacttatgcggatgagatcgccggtgaggtatttcatgccgggcaggaggaatttcgtatacggaaggaagaggcggagatgacgaaaggtacttatatcatagaacgccagtcgaaataccagtctggtgatagcgtgttaaatgggttgaaaaactcgttcggtttccagctttatcccaaggatacgacaaagatccatagttttcggcttcatctggacccgaatatgccggaagatagcttattggttggggtagatcgttcggtcgtggagttctttgtgcctttctctgcggagcgtttggactccatcttgtctgccggtctgcccggtctggattatcgggtacgtccgttcgtagcgagcgatacattgtccggacagtcatcggccttatggttaccattatcgaaaaacctgttttcaacctctatctcgatatgctatgtgttcgccccgatcgagcgaaaggcggtgtgggtggatgtggatcttcccatgaatccgttattgggccggatgggatggcagcttttcctaagtattttccttatcttgttattgctggcttgtttgggtttccagatccgtacgatctgggagcaaatgcgcttgaacgagttgcgtgaggggttcgtgcatacgatgatccatgagctgaggcgaccggtacaaaccttgaaggtattcgtctctttcttgaatgaccgggagatgcggatggatgaggccacgacggaacgggtccttcaagactccatgttcgagttggataatctttccgcctatctgggaaaattgaaagatatggtttgtgcggacgagcgggagacgctcttgagaccttccgcttttaatctccgtgagttggtggagaaggtggtacgcctaaccaatatccctgccgggaaaaaagtctctttctcgacggcctttcccccggatatgccggatctgacagctgatccggtacatgtggcgaatgtcttgtctaacttgatagagaacgctatcaaatattcgggagaggaagtgaatatcgatatcgtagtgctttggaatcagcaaggggtcgaattgaccgtttcggataatggcttcggtatcgctccggatgagcggcgaaaggtgttcgataaattttaccgttcgtctcatctgccggataagcaaattccgggtattgggttgggattgagctacgttcgccaaataatagaggcgcatcatggctctgtatccctgcgaagtgaattaggtgaaggcactcgaattactataaatctaccgactacagccttatgaaatcgacattgaaaatacttttcgctgacgatgaccttaagtattccctcgtcttgaagcgattcttggaacgggaggggtatgaggtgacttatactggcaatggtaccatggctttggagcaattcccggttgtgaaaccggatctggtcttgctggatatcaacatgcccggcctaaacggtttcgaggtagcggaaaagatccgtgagcaagatcgtcatgtcttgatctttttcctttccgaccgttccgataagaacgaccgtttgaaaggttttagcttgcgcggaaacgattacttggcgaaacccttctatccggaagagctgatcgcccgtatcaaggaccgttttgagatcggtgtccatgaaagcgtgctggaggagagcttccatttcggaaatacgaccttcaactataccacgaacgagatccgtaccggcaataacaaggtattgatcacttcccgccaagcggatcttctgcgaatcctggcgacaaacctgaatctggcggtggatcgtgaccttctgttggaaaccgtctggggaactagctcatacgccaactccctggccttgaatgtgcaggtcacctatctccgtaaagcgcttcataacgatccgtctaccagcatcgtatccttgccgaagaaaggatatatgctaagaggatagaatttatccggtagaattgggtttctgatctgtaagcattatctttgtcccacaaagtattcacagaaagaaaatgaatcatatatgaacttcagcgaacaatgtttccgcatttttgagcaagctacggaggcttatcatgtaactgacaatgtagatgctacagtgcataatccctatgcggtaaagagcatcgagttttatctttatcttaagaactggatcgatgccgtacaatggcatttggaggacattatccggaatccggagatcgacccggtggaagcgctggctatcaaacgccgcatcgacaagtcgaatcaagatcgtacggatttggtagagttgatcgatagtttctttctggataaatacaagaacgtgaaagtcttgccggacgctacgatcaatacggaaagcccggcttgggcgatcgatcgtctctctatccttacgctaaagatctatcatatgcgtgaggaggcaaaccgtccggatgctactgccgagcataaggctcgttgtgagcagaaactggcggtgctgatggagcagaagaaggatttgtcgatggctttggatcaattgctatccgatatccgtgacggtaagaaatacatgaaggtctacaagcaaatgaagatgtacaacgacccggccttgaatcctgtgttgtacggtaagaaataatggcaaatatattagtaatacgactttcggctatcggggatgtggcgatgaccgttcccgttatctattccgcagccaaggcgaatcctacggactcgtttaccgtgttgacgcaagcgttcttgatcccggtttttatcaaccgcccgaagaacgtgaacgtgatcggtatcaatacgaagagcacggagaaaacgttggcgggattgcttcgttttgcctctgccttggtgaaatacgatttcgatatggtgctggatttgcacgatgtgttgcgaaccatgattatccgtacgctgttccgcttgaacggcagacgggtgtttgtcgtggataaggcccggaaagatcgtgcccggttgaccgacgcgaagcataaacgatttaaacaacttcgcccggtgatcgaacgttatgcggatgtgttccgtaacgctggacttcattatacggaatcgttcacctcgctttatgagacctcgacccctgatttatccgccttggaaccccttgcgggaacgaagacgggcaaatggatcggtatcgcccccttcgccaagcaccggggaaagatttatccgaccggggagatggagctggtcatggccgagctttccgatcgagaggattttaccatcttcctgttcggtggtcgtggctacgaggaggcgctcttggatcaatgggcttttgagtatccccgggtaaaaagcgtggcgggcaagtattccttggatcaggaactggccttgatcagccggttggatctgttgatttgcatggattccgccaatatgcatttcgcttccttggtcggtacacgggtgctttccgtttggggcgctacccatccctatgccggattttacggatatcatcaggatccggaagattgtatccagttggacttaccttgtcgtccttgttccgtattcggccaaaagccctgcctgcggaaggattgggcgtgtatgagacagctcaatccggatctaatcataaacaaggtattaacctctttaaatgaaacggtttcggatgaaggaggtcattaacccggcgtacgggcgattcgaggattttgtaaggcgtgtacctcgtatattttcagaagagggaaaaacgatttataaggcgaggaatgagatcaaggtttttgaggtagatggtgtggaactgaatgtcaagcgatatagagtccccttcttgataaaccgtgttatttatcgttttttccgtcagcctaaggctgtgcgagcctatgagtacgctctgcgtttagtcgccaaggggtttgaaactcctgccccgatcgcttatatcctttttaggaagaaagggtttttgggatatagttattttatcagtctgcaatccagctataagacattgtataaagtcggacagcgtccggtagaggggaacgaggatatttttcgtgcgttaggcacttatatggcagagttgcatgaggcggaggtctatcatgccgatttctctcccggaaatgtattgtacgatcgtacggaggaaggggttaggttttccttgatcgatataaaccggatgtatttcgggcctgtctcgctaaaacgaggatgcgcgaatttctcccgcttgtggggacgggaagccgcttttcatttaatggctgagacctatgccgagagccggcattttgataaagcggaatgccttcgttggatattatactatcgaaatcgtttctggaagaaatatgcgttgaagcatgagattgaatttgaattatagacttttatgaaaatacaaatactccggttctgtttagttgttagttgtcttttggcctatgtatctccggttaaggcgttagaatggtgggaaaaggtagagtatctgacttactcgccccgttatttcgggccaaatgcctttccgattcccgagttggtgggaggaagcctgtccagccgttgggaagtggagcttcggggggaatatcataagacgcgaggcgatcagacaaaagatatctttacccgtttgtacattcctgtcgtaaaggggcgtgtaggagtgaatgtcagttgggtattccaagaatggtatgagatgtcgccggaagtgcgggatgagcgttatgcggtagaactgaaatccccgattgtttgccggggcgacgtgatctttaatttttatttccaagctctccggagcgagaagtggatggatatcgtggtaagcgccaacctgaaaaccgccagtggcggacgcttgtgcgacgctcgttatacggatgcggcctcttattggttcgacgccaatctgggacgtacgttgtggaagcggaaagatgtaaacgcttcgatccgtgtacaagctttagcgggtttttattgttggatgacgaacgatgtcgttaatcgtcagaacgacgctttctgttatggggcaggtgtgttaggaacctatcggggggtctcgttggattgtaattatgccggtttccggggatatcgggataatggggataagccgatgattctacggacaaagctaaattatgagcttaagaaaaatatcctgtccttccaatataaacatggaatgaaggaccatctttatgatagctattcattagcttatatccgttgtttctgaatctgtaaataatctatgctttcttgatcgacctgaataacgtggcgaagccgtctgtataagcctttacgctgaaatcttggatgatatgctcacgtgaggccttggcgaacgcttccaatcgctccgggttatcgataagcgagcggatagacgccgccatttgttgaggagaagaaggcggcactaacaatccggtgactccgtctatgattaagtctcttgctcccggtatgtctgttacgatacaaggtactgaacaagccatagcctctcgcacgactctaggggaggcatcccggtgcgagggaagtataaacaactgggacgtgaccagaaaagagatggcgtcggaacgctgtcccagaaaatgaatttgtgcgcttaccttcgactgttgggctaattggaaatcattttccccatattctcccacgattgtaagatgtacccgtggatcatccaataagataaacgcatcaatcaaatcggttaagcctttgaacggcctgttcttcgtcgctccgatatagatgcaacgaaaggcgtcgtccggaatatcgtctgcttgtttgggcgtacggactgcctccttgatccaatcgatatcaaatggctttgtgctggtcgttagtctttttcgtgcgatgaatcgggagagatattcctcgatatctttggtctcgcatacgacatgctccacggcgggatttaatatgcctagataataggtcggatcgaaccgcttcaatttagcctgcgtacctcggtatgcgatattcttcgcccgtgtgcctatggaggcgaatagagcgtttgataaaccggaactactcggtgagtagataaggtcgatccgataagtcttgatgattttgcgcagggcacgaataacgttccagttgaacttcgaggtaatgaccggcagatccaaaggtgtacaattcccatagatctttttgtcggtatacgattggggagaagcgatatagatgttgaagtcctcaagcttggacaatccttccagcattttgtaggtcgctatatcggcttctttatagactaaaagtatattcattgtgtatggataaaatggatttgctaagatcgtgagatattctcgtatactcgcatgaaatgagccgctaatacgtcgggcatgaatcgccgtatattctctcgtccgccggaacgcatggattcggccagcttcggctcgttcaatacggactctatcaagctgcgcagctcttgctcatttctcggatcggtatatagagcggacgatccgcccgcctcttccagacaagaaccggtagccgctatcactggaataccggcaagctgggcttctaagatcgggataccgaatccttcgaaaaacgagggatagacaaataaggtcgccatctgatagaaagcggctaattcgttaaaaggtatatgagtcaagatacggacacgaccggacaggttgttttcccggatataggtctctaccgtgtccgtataaggcgtatgcttaccgatagcgatcacggagatatcttctttcagctctttcagggcttttaccagaagcaataaattcttccgttcctcgatgctccctacatataatatataaggcccgtttatctgatatttctcgcgtacggacgatttcacgtcttcttgaaccgcttggccgaatatcgggtcacaaccttggtaaacaacctcgatcttgctttccggaatgtggaagaagtcccggatgtctcgcatcgtctgcctgctgatcgctatgatcttgtccgaccgtaaacaagcttgcttgaatttgtaggtatagatggaacgatcgatcggtttatagagctgcgggtaacgcaagaagatcaagtcatgtatcgttacgaccgccgggattccgttctgttttaggttcatcggaatctcgttgctcaagccatggaacagatcgacgcgctcttttcgaagcgtagccgtcaggcccgaggtacgccataaagagggaaatagcttatcgaacctgccctccggataatggaatgatacattcggacgctcctcgatccgtttccgcaacgcctctttgcctttgcccggcgtatagagttgataggtatgctccgggaaagaagcggacaggctattcacgacgaaccggctataattacccagtccggtagcgttatgcgtaatccgttttgcgtcgaaagcgatcttcataggcttgaattcgatatatggggcaaatatacgatataattttaattacctttacctcatttccttccgaaatccgccgggatctccccccatacggatgtttcccatttgaggatctgggtggtataggtatgggtgttcagccatttttcggcccgctcgatgaggtcgaagataggttcgttgatcggtttacgtgctaataaggttttgcatttctttttcttgacccagctgatggcgttgcggctatccgaatagatcggcaggtcgcttcccttttgctgtagcaaggcgaggccatgtactaaggcgaggaattccccgacattgttcgtgccctccttcagcgggccgatatggaagatctcttgtccggtagcggtataaacgcctctgtactccatatccccgggattaccgctacaggcggcgtctacggcaagactctcattgatggggttcccgatcggggcttccggcgcgagacgggccacggctttcggggaagaggcggtctttaggtaatgggtatagccggcctcgaaggctttggcggcttcctcccggttctcgaaggatttatatttggctccctcttgcccgtctacctgtgccttgcattccgcccagttatcatagattcccgggttcaaccctttccatacgacataaaacttattcttggccatggctcttgctcaagatttcttgtgagaattgcgtataggtaccgaacggcgctcttttgtccttgaagaaacggatcaaggcatccagccttctttccatgccgcaaccggaatggttggtcatgataaacggtaactttagctctttccgatcacttaaggaggtgaactcccacggatggaaataggtcaggaaataaccgtcctctttccacgtccaaagcgccagcttacggtacaaggaggccggaaggttatggtaagccagccaaaacaaggggaaacggacgatcggggtcaccgaggcgggcagttgcaatacgccatctttcatgaaataggtacggggctgccccagatggttgtaacggccgggaatgcaagtcgggttcaaggacgagttgtatagataaccggccttatggatctcttcttcttcgacgggcatcatgcgggccatacggaaaccgttcaccggttgtccggtcagttcctccaatgcctctttggacttgcgtagatcggcggtctcgaacgacgagtgataaaaaccatgcgaagcgatctcatgtccacccttttggatgtccaagatcaaatccttcgcatgaagggcgaagttcgccgtgcaaaagaaagtcgcttttacccggtgacgggccagacatgccaatatcttccgggttccttccacggaagtacgcatttgttcctcgaacggcaattccacgccgtgttccaatggagcgtcaaactcctcgatatcaaaactaagtaatatcatgaatgttaattaatctctatgaaataagatggataagaagttcaacgcttcccgccgcaggaccttgaatcccatatcggataccgctagtccttctttgatgttcgcattgatcgtccgtaagtttatctctttccggcgacttgccttatagataaattctgtatcgaacaggaagctattgatacgggtggtcaggaatatcgcttgtcccgcttgactgaatcctttcatacctccttgcgtatccttgatcttgatcctcaaaatccatgtgttacatatatgggatagcttggatagcacttttcggaaaggaggcaaattctcctgataacttttgctacgggtagccacgaccacgtccgctcctcctagcaacgtctcgaccatcctgccgaacgagtcgtttgtataagggaaatcgtagtccgtataaataatgtagggagaggtacatcgctttactgcctctcgcaaggcatatccttttcccctgttgggcttatagtctacgacgcagacattcggtatcaattgccggaggcggtcaatcgtttccggctcgtatccccgtctcgaaccatcactgacaataaaaaggtggaaacgtaccgggctgaataatcgctccacttcgtggaaatgggtggctactcgttcctcccagtccgaaggcgggttgtaacaaggtaataccaaatctatgtctgctcgtgcgttcattccatttatacctttaccggattataactcctcgtacacatctcaaatgtcagctttagccagatcagcatacaaggcaacgcttttaacgcatacgggtatacataatgcactcgtatgtatttcgggaaaagatcggacggagacatgctggtcaatataaaggcgaagaccatcaagacaatatccaatgtcgaacgtttccacggtacagccgtataccaaatagcgactccgataaacgctatgatataggtactggactcgctacccgtgctgaacagtacgacaaacatcaacaccgaggccaataacgttttccggaaagcctcatatttatattgactgatgcgtagataaggcaggccgaatactattaatccccctattatcagataaatgtccgagtaactgaccgatcccgatatcttacgaaccattcccaagaaggaaatgttctgcatgagcgcgaataagttctccgaattttttccggataagtcctcgaaccaaccggtatattgggacattatataatccggcccggacaatatcatcggggctacgaccatgacgaccgcccatcctacgcaagataggctgaacttcatcttatggcgagagaaaaagaagaacgccaatcccgtgatcccatacaatttagtaaaggtacccaacatgatcacgaaagtggcccatacgtctttctctttctctatcaatgcgtaggcgaggacaatgatagcggcgatactgatattaaattgcgacatgaaaagcgaggtaagcaactcgtgggcacagaaccaatagataaagatacgttcccgcttgatccccggtagcatcttgaccgcccagaataagaaaaggctttgcgccactgaccaagtaagcagtcctaaccataacggtgtaatggcgaacggagccactaccaagctaaataccggcccgtagtgaaaaatatcgttgtattcttccggataggcggcatagagcggtaactcattcaacgtatgccaaaaggattgcctgaagatggagaagttgttatatttcccggggaaatacttggtaatccatgcgataacccccagcaatgcccatagccccattaaggtactatatttgctgaaaaatggcttatggatgattgtattgaacttatctataaatttcatcatcgaatctacatctgtctacggggcaaaattacataaaaacggtgacttttatgcgagttaaataaaaatactatttttgcgtccaaaactggtaagagattatttatgaatgaaatgttgagatacacgatcattcgtgtcattctgtttgtaatgggaggctttcttgttctcggatgttcggatgaagatgatgtgggtaatagtggaggaacgagtaaatatggtttgatacggatggcggaggaggattatgattcgtcgaatacttcttacatccttcaggatgaggaaccggacgaggttcttttcgattcgtcaaagcgaaaattcaaggtgaatgagcctttgcaggtgtcagttaccgggcagaaggagttgatgcttcgtttctattctcctagagctatccataatgtgattgtctgggctacggttgagggttatgaggatgaggtacggtttgcggagtttactacggttttaccttttcaggagtttaaaatgaagttgccttttctagaacgggcgaaggtttattatacacgttccggcgaggaggttaccatagatgcccatccggatatcgtggccgagaatataagtttgcgggttgaatgtggagatccggtctatcaaggaatgataaacgtgaaacctaagtgggatatttggtttggtaaatattccggttcgaactggggcaactttaggccacatctggctcgtgaggcggttgccctttccttgaatatggccgcgatgttttcttcctcgctttttgatgaggaactggagaagtggcgtggcaagctgataaataacgagcaaatcgtggatatagatgtgttgaagaaacagatcacgaatcatggcgggttgtgttatggacgcgtggtgaatgttgtcggtctgggtggaggaaatacctttgggctaggtgaatatgtctatctgacccattatgccgacgatgccaatggttctgacacgccgtatcatgagctggcacactgcttggggtatgggcatagtgggaatatgacgtactatccggcggaaggcggtttccctacaatttgtatgaaggtttactcacagctttccgtgagcaagaaattaccggtttattcccgccgtttcttgcatacccggaggaataagaatctggtagagaataaaaacgtgtatacttcctcgaaatacattatcgatgatccggaattggatgccatagatggcgggcttgggcttgctccgatggagacggatagggctggtgatgagggttctcctctctcatttacactttctgtcttggatattcccggtgccactgtggaaacttttcatccgaaagcggtccatctttatgggaatacgctatatgtagcaaatgacgctccgggacattatagtttggaggtctttgatgtatcttccggtaatgtgcgtcatgtgaaaagtatggttgagtggatgaacggagataagaaagagacctttgcgggggagccaaacggcgtgactcgctcgtatgggaaaatatatgtcacgaatacgggaagccgtacggatgtgtttgatgcggaaacgtatgagttcattacttgtatcggtacgggtacttggggtgagggtggttatcagaccgttcatgcgtttgatgtgacggctagtcaaggggctgtctttatccgggataaacggaaactggtagttgtcttggagcaagatgtacagcccggttccgctgctcgggtacctatatatagccgtagcgtaaatttacaagaggcaatgggtacttatgcagtagcggcacgaaatgatggctttttatatgtgacggcccagaataaaaatataatctatttattcgatcctgcggacattcgggcaggggacacgggctttgcgccgtatctggtgacattgggatttgaaaagtctccccagtcgatagcgtttgtaggggatcgtttgtttgttacgcttcgtgtcgatgataaacggtcggagctatgggagatcagccctaagaacggaaaattattgcaggactttacagattcgatggtctatcccgagaaaatagccggtgctcgtcatactttattggtagtggatcgtgcgacccagacagtaaaagccattggcctatgatttttttattgattcttaggaataaagaagatggagttcccggaaaaagtttacatttgcgaaaactattataataacgtatgaaacgtgtttttttggtcggatatatgggagcgggcaagacaacggtgggaaaagagcttgccaagctcgccggtctttcgttcatagatcttgattactatatcgaagggcgttatcataaggccgtttcgcagatattcgccgagagaggggaggaggctttccgagagatagaacggaatatgcttcacgaggtcgctgagtttgaggacgtgctgatctccacgggaggaggcgctccttgctttttcgataacatggagtttatgaacgcttctggcacgacggtttacttgaaggtgtcagtcgaggagctggcgaagcgtctggagttgtgcaaacatacccgtccggtgttgaaaggacgttccggggaggaactgagggcgtttatcgccgagagtctggagaaaaggaatccgttttatacgaaggcgtccataacgtttgatgccgagaagatgttaacagaatctgatgtacatgacatatcgaacgcgttaatgaaaatcctatagcatatggaagcgaacgacggccggcaggcacagggggcctatatcccgcaggaattattgaaagagatcagcaaggtgaataaccgtttgctcatcggtattcctcgtgaacgatgcgaggcggaaaaacgtttgccgttaactccggaggcggtggatatgctgaccgattgcggtcaccgggtgctggtggaaagtggcgccggattaggcatcaactattccgataatcatttctcggaggcgggggcggagatcgtcgatacgcccgcagaagttttccaagcggatctgatcttgaagatattgcctccgttaccggtggaaatcgcgtttatgagacctcgcacgaccgttttctcattggtgcagtttaatttattcgctcaagaggctttcgagttgatgatggcgaaacggattaccgctatctcttatgagttgatggcggatgaatataatcgtttcccggtgctgaatgtcacttccgagatcgagggggcggcttccataacgatcgcttccgagctgttgagcaatacccaaggaggtaaagggatcttattaggcggtatcccgggcgtatcccctacggaagtggtgattatcggggccggaaacgccgggaccgtggccgcgcgtgccgcgttggccttgggagcatccgtgaaagtattcgatgatgatatcaataaattgcgtataatacaacaggtcttagggcaagggctttttacttccacgttccatccgaatgtgctgcataacgcgtttcgtagcgctgacgtggtgatcggggcgatgcgttatattaatacgagacatcgctatattatcgctacggacttggtgcgtacgatgaaaaagggagctttggtgatcgatctgagggtaagccaaggcggttgctttgagacgacttgctgcttgtcgagggaagatcccgcggtgttcgagcaatatggggtattacattattgtaaactgaatatcagcaaccgggtggctcgtactacctcgatggcttatagtaatatattcgtacctttattattgtcgttgggcgacgccggttccgtgcaaggaatgatcaaatcggataagggctttagggcgggagtatatatgtattatgggaagacagtgaatagttatgtgtctaaccattttaatctatcatctaataatcttgatctatacctctctgctttttgatgcggaaaagttttgaactcgcaaagtttatgctttactttgcggacgatctaaataccaataagcgataaagctaataaagtatattatggcagaacagacaaaagttaagacgctggagaaggttgtaattcgtttctcgggagactcgggagatggtatgcagttaaccggtacaatcttttcaaacctgtccgcggttttcgggaacgagatttctacattcccagactatccggcagaagtacgtgctccacaaggaacactaagtggtgtatctggattccaagtgcacttgggatcgcgcaagatcttcacacccggtgataaggccgacgtattggtggccatgaatcccgccgcgctgaaggtgaacgtaaaacacctaaaacccaatgcgattgttttaatcgacacggactctttcaagaaaagtgatttggataaggccttgtttacgaccgatgatccgtttactgagctgggattgactggcgtgcaggttgttgccgctccgatctctacgatggtaaaagacggattggttgagtttggtttggacaataaatcggctcttcgctgtaagaatatgttcgccttaggacttgtttgctggttgttcgagcgtccactggaggaggctatgcacatgttgcagaataagttcgctaagaaaccggttatcgcccaagctaatatcaaggctttgacggacggttataattatggtaataacatccatgcctcagtttctacgtatcgtatcgagagtaagaaagccgagcctggattctatacggacgtgaatggtaataaggctacttcctatggtttgatagccgctgccgagaaggctggtttgcagttgttcttgggtagttacccgatcactccggctactgatattttacatgaattatctaaacgtaaggatttaggcgttatcacggttcaggccgaggatgagatcgccggtatctgtacttctatcggagctagtttcgccggttgcttggcggctacatctacttccggaccggggcttgccttgaagagcgaggcgatcggtttggctgtaatcgccgagttgcctttggtgattatcgatgttcagcgtggcggtccttctacgggcttgccgacgaagagcgagcaaacggacttgatgcaggctctgtatggccgtaatggtgagagccctgccgtggtaatagcggcctctacgccgactgattgttttgatgccgcattttgggcgggtaagttggccgtggagcatatgactccggttatcttgttgaccgatgcctttatcgctaacggttcttccgcttggagaattccggaaatggataaatatccggagattaagccgaattacgtagctaattatcaagacgagaaagtctggaaggcgtatcgtcgtaacaaggaaagcttggttcgttactgggcgattccgggaacggaaggtttcgctcatcgtctgggcggtctggagaaagactacgagacgagtgcgatctctaccgatccggctaaccaccagaagatggtgacgacccgtcaggctaagatcgataagatcgccgactatatccccgaactggaagtgatcggagatgaggacgctgatttattgatcgttggttggggtggaacctacggacacctttacgagacgatggagacgatgcaagagaatggcaagaaggtggctttcgctcacttcaagtttatcaacccgctgcctaagaatacggctgaggttctttctaagtataagaaagtggtggtggctgagcaaaataacggccagttcgctaactatttacgtggaaaggtacccggatttaacccgtatcgcttcaatcgtgtaaagggacaaccttttgtcgttgcgagattagttgaggaattcactaaaatattggaggcttaaaagatgacaacagaagaaactaaatttcaaccgaaagattataaaagcgaccagtacgtacgttggtgcccgggttgtggcgaccatgcggtactgaattgcctgcataaggctatggccgaggtaggagtggctcctcacaatatggcagttatctcaggtatcggctgttcttcccgcttaccttattatatgaatacgtatggcttccatacgatccatggtcgtggagcggctatcgctaccggcgtaaagacggctcgcccggacttgagcgtatggttgattacgggtgatggcgactgcttggctatcggcggtaatcattttatccacgctgtccgtcgtaatatcgatttgaatatcgttcttttcaacaataagatctatggtttgacgaagggacagtactccccgacatccgaccgtggtttcgtatccaagagctctccttatgggacggtggaagatccgtttatcccggccgagttggcgttgggtgcccgtggtaatttcttcgcccgtacgattgacgtggatttgaagaatacgaccgaggtattgacggcttccgcccgtcataaaggtgcttccgttacggaagtgctagtaaactgcgtgatctttaatgatggtatccataaggggatcgttgataaggcataccgtgcggatcgtacgattttccttcgccatggcgagaaaatggtttacggcgctaacatggataaaggccttgtgctagacggcctaaaactgaaatccgtaacgatcggacaagatggttatacgatggatgacgtattggtacacgacgcccatgagaaggataacaccttgcatatgatgcttgccatgatgagcggtgatatgccaattgcgttaggcgtaatacgagatgtggagggaccgacctatgatgaggctgtccaccagcaaatcgaggaggtacaagcgaagaatcctacacgtaaattacacgaccttttgatgaaaggtgagatttgggaggtaaagtaatatatttctgattggatataagagaaggcgcaagatatttatcctgcgcctttcttatatttatacgctggatttgtttgtgcggaaaaaagtatatatctttgtttcagtcacaataaaagcgaatacctatgatgacaacttcggaaatagttgagatgctagctaaaagtatatgatttgtaaactccatattacaaatagactaagggttttgttaattgcatggaaaagagtaattattactgaaaaatttccttaataagctgtgtacgataaaaaaaaatattacttttgtaccgcggttaacaaggtggagtcgcagcaagctccaaaaggtcggaaagcctcaccgtatcgaactagagtagagagaaaagttatataaagtcaatcatttaaattaaattcaagatggctaatttagatttaagcaagtacggaattgttgatgtgaaagaaatcgttcacaatccgtcttatgatgttctgttcgcagaagaaactaaaccgagtttggaaggcttcgagaaaggccaagtaactgagctaggtgctgtaaacgtgatgactggtatttatacaggtcgttctcctaaagataaatttttcgtaaagaatgaagccagcgaagattctgtatggtggacttctgatgaatataagaatgataacaaaccttgttctgaggctgcttgggcagacttgaaggctaaagccgtaaaagaattgtctggcaaacgtttgttcgttgtcgatacattctgtggcgctaacgaggctactcgtttgaaagtacgtttcatcatggaggttgcttggcaagctcacttcgtaactaatatgttcatccgtccgacagctgaggaattggctaactacggcgaacctgatttcgtttctttcaacgcagctaaggctaaagttgacaactacaaagaattaggcttgaactctgagactgctactgttttcaacttgaagactaaagagcaagttatcttgaatacttggtacggtggtgagatgaagaagggtatcttctctatcatgaactacttgaacccgttgcgtggtatcgcttctatgcactgctccgctaacacggataaagagggcaagagctcagctatcttcttcggtttgtctggtactggtaagactactttgtctacggacccgaaacgtttgttgatcggtgacgatgagcacggatgggataacgaaggtgtattcaactacgagggtggttgctacgctaaggttatcaacttggataaagagagcgagccggatatctacaacgctatcaaacgtgacgctcttcttgagaacgtaacagttgccgctgatggtaagatcgatttcgctgataagtcagttacagagaacactcgtgtttcttatccgatctatcacatcgagaacatcgttaagccggtttctaaaggcccccacgcaaaacaagttatcttcttgtctgctgacgcattcggtgtattgcctccagtatctatcttgactccggagcaaactcaatactacttcttgtctggatttaccgctaaattagcaggtacagagcgtggtatcacggaaccgactcctacattctccgcttgtttcggtgctgctttcttgtcattgcacccgacaaaatacggcgaagagttggttaagaagatggaaatgactggcgctaaggcttacttggtgaacacaggttggaacggtagcggcaaacgtatctctatcaaagatacaagaggtatcatcgacgctatccttgatggttctatcaacgaggctccgacaaagaagatcccgtatttcgacttcgaggttccgactgcattaccgggcgtagatccgaagatcttagatcctcgcgatacctatgctgatcctgctcaatgggatgagaaagcgaaggatttggctgctcgcttccagaagaacttcgctaagttcacgggcaacgaagctggtaaggcattggttgctgcaggtcctcagttataattgcttaaaaaaccttgatcaaaaaaggtcaaggtttaaaaatatctttataaaaaagcgtagaattactaattctgcgctttttttatgataactgcgttaattttattataaatgtgaagtagttttaaaaaatattcctacctttagaccggattatctgttataagaagagcttaaaaaggagtaatgataaaaaaactggcacttattattggctttataatttgtttgtcatcttgtggcaaggattatgtctatcggattgaaggggaactttctaatctggaagatcaaaccgtatatgctgtatttgagaaggataattataaagtggttgatacagtggcttgtacgaaacccgggcagttccagatcgatcaaaatgaagcgggtttccattgtgtgactatcttcttcgcggataaagagcattgggttacggcttatctggaaccgggagaaaccgtaaaaatcacgggcgacgctaactctccattgctattgcaggtaaaggggggacggacaaatgataagttgaccgcttttaagaaaaaaatcgctcctttattgacggaattgacaaatttatcaaagtctttaaatagcaaggatttgaacgatacgatcgaggagacggatatcgccgctcgtttggcgaatgttaatatgcaattgagcgaggaagcgatccggtacgtgaaagagaacccgaatgaagaggcatccgttgtcttgattcaatcttttttctcagatcccgatgatactcgtaaaattgatgagttattggcgttattgaatccaaggttgaaagacttttatctggtaaaggagctggagcaatatagcgcccgtgcgaaacgtacggctttgggtgcggaagccccagatttctccgtaaggaatatttatgggaatacggtaagtttggactctttcccgcagaagtatttattgctgacgtttaccgctccttggtgtgatatgtgccagacagaggatctatatctggataaggtagcgatgaaatatccgaaagatcagttggatattcttttggttagcttggacgataatccggataatgtccgggatgtactgaagaaggatagtatagcgtggaacttggtaacagattcggccggacaagcggctatgttgatagatctgtataacgtaagcgtattgccacgctgtttcttgatagatgaggatcataagatcttgatgaaaacagagaatggaatcgagatcaagcaaacactggaaaacttgttcgaagactgagcgattgaaaacaggaggttccggttttaatttgtaattagtaactcaaaattcttaactatgttagtaaaatcttatgccgctgccgtgcaggggatttccgctacggtcgttaccgtagaagtgaactgttccaaaggtatccaattctttttagtcggtcttccggacgtggccgttcgtgagagccatgaacgcattatctcggctcttcaagtatgtgattataaattcccccgcaatcgtatcgttattaatatggcccccgcagatatccgtaaggaagggtcttcttatgatctgcctttggcgatcggtattctggcggcggcagagcagatagattcatccaacttatccaaattcgtattgatgggcgagctttctatggatgggagcctccaaccgataaaaggggcattgcctatcgctattaaggctagggaagaaggctttaagggctttatcttacccaagcaaaacgcttgtgaggctgcggtggtgaacgatctggaagtgtatggagcttcgaatatcaaagaggtgctggagtttatggaggggaaacctacattgcggcctacggtcattgatacccgtaaggagttttacgaccgccagcaattgtttgattgcgatttctccgatgtccggggacaagagaacgtgaagcgtgcgatggaggtggccgcagccggcggacataatctgatcatggtaggtcctcccggaagtggcaagtccatgttggcgaaacgtctccctacgatcttgcctccctttaccttgcatgagtccttggaaacaactaaaatccattccgtagccggtaagataggaggtggcacctccttgatggtacaacgtccttttcgctctccccatcatacgatctctaatgtcgctatggtaggaggtggcactttcccgcagccgggagagatcagcttggctcacaatggtgtcctttttttggatgagttgccggaatttaacaggagtgtcttggaagtcatgcggcagccattggaagatcgagtgatcaatatctcccgtgcccgtttcacggtggaatatccagctggctttatgcttgtggcctccatgaatccttgtccctgcggctactacaaccatccggaccgtccttgtctctgttctcccggagccgtccagaaatatatgaaccgcatttccggcccattactcgatcgtatcgatatccagatagagattgtccctgtccctttcgagaagatttccgagcaacagccctcagagcctagtatcgctatccgtgagcgggtcataaaagcccgtgcgatccaggaaaggcgttttgccgcttatgagggtatttattgtaatgcccagatgaactccaagctactccatcagtacgccgttcccgacgcttccggcctctccatcctcaaaaccgccatgcaacgtctctgcctctccgcccgtgcctatgaccgtatcctgaaagtctcccgcacgatagccgacttggataattcggaacatatcgaagtccggcatttggcggaggcgatacagtataggagtttggatagggagaattgggggatgtgagattgcacttagaatacatctattaaccataatagtgcagttactaagctgaaaaaactatctttatattagttggaaattgcgctatttatggctgttgaagtgaataactgacggcttgtcgagtgaacaactgatggctatacctggtggtcagcttacggcttgggaagtgaataactaatcacttgggaagccttttgtgaatgatttaacgtgctgtatgccagtcaagaaaagatatccgagcagaaggtctttaaaagtaagctagcttacttttttagggttgtttaggaattgcggtattcttgcggactcatacctacatggcgtttaaaatactttccgaagaaggacatattagtgaaattcagtgtataggcgatatcgtggatggtaaggttcgtcgattttagttgtgcctttgcgtccatgataaccatcgaggtgataatctctatacaagtttttcccgtactttgtttgacgatcgtacttaggtgtgcttgcgtgatgccaagccgcttggcataccatgcaacggatcgttgcatggtatagttttgcattactagttgagtgaaattcttactgattagctctgctttggagagcattgacaggtcttccgtctggtctttatacatgctgctgatccccatcagcataccggtaaacaaatggttggtaatcccgcgatttattttcgtggcgtaaaactcgtatgttttgagtaataactcaaaataatctttcataagaggctgggctttctcttttagcttatacaccggattgtctttcacgatataatgcatgtctatgacagctttgctggagttcgcttggctgaggaaatcagatgagaatcccatgaaatagatctgtaggtccccgtctgccctatggatctgcaggattgatccgggcatgatggtgatgaagcttccgggttctaccttgagttgcgtcaagttgatggatgcctcgatctctcctcctaggcatagcacgaaaatccccgctttcaatcggcatgggtaattcgcatacagattcagcaggcctatatcttcgatcgaaagcttcccgatcacccaatcttgaggcaggtctattttgggaatgtcattttccatgtttgtttaattattcacttatcgggaacgtttgacaaaaataggcatttttaaagatttgccgtgtcttgtggaaggaaaattatacgagcgtctgaaacttgcggtattccggaggcttttcggagtcgcttgggtgtttgggctggactggtatggtttcttgtcgaaggaagtagttgccattagaattatcttttctgtttcgttttgattgaatttggatgtatattgtgacaggggtatttccttgacctatcaaaatagcgaaagaatcaggaagataagtggccttttatgttaaaaagtaacgttttcggtacacgttagacggcgaatatgtatgcaataggcagcattgggcaatgcctatactgccgttgggcatcgtgagtagtcgtgaataggggtgtaagtagtcgtgaataggcattcttatactgttataaccctattgtaagactgttttttccctctctcactccccataatatgaattacgatgaattatttttgctagaacaaaatgtcgttttttgatatatggctatcattcaaataattgctgattttctcttatgaatttggaagtaagtagtactttgccccgaaataatcgatactcaagaggttgagattacaaattgccattttgtcaaatccttttttcttccatcgaagcgactatcttgtaatcttgctttctctaggggcggctcttgtctgagcgcattttgtttaggcacggtttctaataaaaggaacaatgggttgtaaaaatagaacatggccactctttataaatggctctgtatgtgtaggggtgaggtatggaatctaaaaaaaggaataggtaataagacaaatagaccttgtaggatctttgtgaaatatattcttttgcatccgaattgggatcgaatggatctatacgaattgaagtaattgaaaaaagcatttatatgaggaaaaagaattttacatctatgggaatggcctgcttactgggctgttgtttgatgttgggtagctgtagctctgaagtggataatttggatattccgaagggcaaaggtttcgtgaaaatagatctggcaccggaggtcggttttcaaacaaaagccgtggatgagagtgagtataaggatgtgaacaattatactgtgcaagtgtttaaatccgggcaagaggagaatcttattattaatgatttgtataagaatttggaagagaaatattctttgaatgttggtaactatgtgttgaaagcctttacgggtgaagataaaccggtttcttccgatgtgttgtatttttctggcgaagctgcttttgaagtgaaggagggaaaggaggtgacagctcctgtaatatgtaagcccagctcagctcgaattaatgttgtgttcgatccgaagatggatgagtatttctccgactattccttgaagattgagacagaggcgcagaaaccctcttcttttgtttgggcaaaggcgacagtcggtccgatgtattttaaggtaggtaatcaggaaaaggtccaggttacggtaagcttgactaagaaagagaatgtaaaagcagaagggacggttaagacctatacgttaagtccagcggatgctttgaaacttactttgaaaccagtagtcaacaatggcaatttaggaatttcgattacaattgaggagactacggttgatcatccggtagatatcgttattccgggggattgggtataaatatatataacagtaataataagagattagaatatgaaagcgatcaatatatggatgttgagcacggttttgttttccggcttgatgtcgtgtgagatgaaagaggagattttcgggaaagagatcccaaaggaaactggctatttgacacttgacgtgagcgcaggttcctctgcttctttagcaacgaaaggagcaactgatcagaaagaagattttccgctcgtgatcaaggcgatggattttgatcttactaaaaactatgagtcgtttgctaagtttaaagaagaaaatgcgaatggtgtgattgagttgccgaaaggaaattatgagatagaggcgcattcgccgggagagtttgccgaaaagatgtacgatccttattatggaggtgtagaaaaagcagagataatgcctagtgtggaaaaaaccgctacggtgaaatgtaagatccagaatgtcaaaattgcgatggattttacctccgagtttataaactattatagcaaatggtctattacggtggatgacaagtgcggtcattcagatatttatacgcaagaaaatccaaacccaactccgatttattggaaaatggctgctgagacagataagatttatgtgtcgggaacagctatagtgaaggaaacgagtgaagaagttattataaatcagacattaacgaagaaggaaagtgctgattttgtagaaagcgacagcccctattttgtaggaggagatggtttggcgatctcgttggctcccggaaaagaagtggatctcaataaaaccggtatcaccatcacggttaacggttttaaccaagagacaaatgagaatattgatatagaagtggaaggtgatagtggcgaagagaatcctgaacctccgacaccaccggtgacgggtgatgatccgacaatcacgataccgcaagctctttatacgttgcccgctgatgaacaaaaaaatgcaaatgttattatatcaactcctgccggcttgaaaaatatcactgtcgcgataaagggaggaaatgagctttttgcgtcaatagttaaagatctatttggtgaagagtttaaattgataggaaatgaagctttaggagagacgttgacgtcaatgggtgtaactttacctgttggtggagaaaagagctatgaatttccggtacatgccttttttagtttgttgctagatccaagtactggtggaggtgttacaacagatccagaaggacacgtatttaatattacggtggaagataatgatggtaaagtcgtaaaagataaattaagtgtaaaagtggctgaataatatgaagacaatatatacacttttattttttgtgttggtattaggtttggtcgcttgccaggccgaggatgatacatccatgaaaaataccggttatttaagtatggatataacgaccaataattccacagccaccaaagcgggaagtgaggaggttgtttataatcccaaacagttggcggtacaaatcttgaatgatcaaggaggtgttgttaaggaaacggatgactatacggcgtgggatggagagcgattttccttgcctacgggtaaatacgtggtgaaagcctcttcaaatggcttcgatggtaaagctgccgagtttgataagccctattatgtgggatcagctgaggtagaggttatggcaggaaaggatgtgacggccgaagttatctgtacattggcgaatgtcttggtgactgttgaatttgacgagctgttcaagaaaagctttaagtctgcgaccattgttgtggctgattcggcagaccaaactggaacccgccttacctttgagttaggtaagaacgagacagcaaaggcctatttcccagttcccgagaagtcgttgattatctcaacgagcgtaacgaatcaaaagggtacactacattctaagaaagataccgttcgtgcggtaaaagctcgagataatgttcgcttgatgtataaagtggctgactcgccaaatggttctaccagtattgatattactttggacggaacaatcaagacctataatttcaccataggtgtgcctctgaccgctaagacaactctatcggcaagtgcggcgaacgcttggagttcatttgcttacttggaggggaaggtgctttcaaaggcaggtgtcttggatcaaagcaagttggcgatggaatataaactggcaacagacgaggcttggactccggttgcgtatctgaccgtaggtgaaaacgatacctattcggtaaggattacgggcttgactcctgcaacaaaatatcaataccgttttatctataaggatacggaagaggtggcaagcgaaatcgtagagtttactacggaggcggctatcgcattatataatgctaattttgatttatggtatcagaatggaaagacatggtatgctggggaatccggtaaatcattctgggatacgagtaacccgggtacgacaacggggttgggagccatagtgaatatcaatcctacccaaggtagttcagcggttgtgcatacatcgggcggaaaatctgcggagttgaaatcccagtttaaggtgaaattcgcagcggcgagcctgtataccggatcttttggtgggctggttggtatgaatggtgctaagatcaattttggtcagccgttcgcttctcgtccaacagcattaaagggctggttccaatacgctccggtaaatgtaactcatgtaggggataatcttccggctgacgcagttgttgaaaaaggagatcctgatgtttgttctatttatatagcgatgtctaaaaagcaatatactatagataataccaaaatggcagaaactgcgatcgattttgagaatgatgcgaacattatcgcctatggtgaggtgcctgtgtcggaatgcgtaagtaccaacggacaatggaaggagttcaatatcctcttgaaatataagaatctgacggagaaaccgacccatatcattgtggtctgctcgtccagcaagtatggcgactatttcactggaggcgatggcagcataatgtatctcgatgatttttcactcatttacgatgacgagcctacaatgtggaaataaaccataggctgaaagtctatgtagggaacaataagtttttactataaatctatttggcaagtaaggatatcttccttgctaagtagattttaaatatctttgtggcaatataaaggatagaactagaaaatggcaataacaatagagcgaattatttgaatgagtagaaaactatttaccttattgctgttattagcaatagtgaccggtaccgtaaatgcacaacgcggtaaacgcaccatcaagcgcatcgaccgagaggtacaggaggctgtgttcatcccgaaaggaacatggatggccggaggtgccgtatcgtattccgagcatgacgagagtaacttgaactttcttgttataaaggatttggaagggaatggctataattttgcgataagtccgtacgtgggctatttcttccgggataatatctcggccggtgttcgcttcgcttaccgtaggaactatttggatctagggaatgtggatgccaatttgggcgacattaccatctcgttcaaggacctctattatctggagcataaatatgagacatccggtttcctgcgcacctatatcccgatagggaagagcaagatattcggtctcttcaacgaggctcgtgtgacctatggctacggtacgggcaagaattccacaggctcgggggctaattatgatggtacttaccagaaggtacagaacctacagattggtttcgcccccggactggctgcctttatcaccgattggagcgccgtggaggtgtcggtcggtgtgatgggtttcgatttcaagtggatcgatcagacaaccaaccaagtggagcagggttcgagccgtacatcgtccggtaatttcaagatcaatcttttttccattaacataggtatgactttctatttgtaattggatatgcgaataatcaatgatatatataaagtgacctgtcgcttttgcctttttgttttcttcgtgctggtttcctgtgcgatagagaatgatataccctatccgatcgtcaatgcgggtatcacggacattcgtgtggagggacagcgtccggctgaaggctcttcggatgatgcggcattaattgatgcttcggcaaagaccatattactgtatgtaaacgattctgctgatatttctagattgaaacttactcgtttggtggtgaatccaaggaatgcgcaggttttggttgattcgactctctgtgctaatcctaataaattcccgtttgccggattcgcctcattggatagtattcctatgtcatccaatacgagggtcgattttaccaaaccggtcaattttactataaaaacctatcaagattatgtatggcaagtaaaggtgaagcaaatcatagaccggaaggtcgaggccaagggtatgatagactattctattgacgaactggataatcgagtgattatttatgtagggaaaggagagaatctgaagaatatctctataacctctttggctttgggtggagcctatggcgaggtgacgccaaatcctactaccgtgaaagatttcacctctccacagaagtttttggttcagtatccctggagcgagcccaataaggggacaatatggacggtatatgtccgtctgaccgatgaggagggaggctcgcagccttcagccggagatctttccgtgaatacatggagcaagtatgcgtttgtggaggggaaagcaacggaggctaattgttcgtttgagtatgtgaaacagggagagacttcttggaacatggtttccgcgaaggcaaacggttcgaaggtttctgcgaagatcgagggattgcagcccgccacggcttatcaatgccgactggtggatgcctcgggaagcgtgttgggcgagtctaccttcacgacagagactgccacaccattatataatggtaatttcgatctgtggcatcaagatgggaaaacatggtatgccggtgaggcgggtcattcattttgggatacgagcaatccgggtacgacaactggattgggggctgtggtcaatatcaacccgactcaaggaaattcaacggttgtgcatacgccgggtggaaaatctgccgagttgaaatcgcagtttaaggtgaaatttgccgctgcgagcctgtataccggatcttttggcagtttggttggaatgaatggtgcgaagatcaaattcggaaggtcgttcgcttcgcgcccgttcgcattgcatggctttttccaatacgctccggttgcggtaactcatataggagataatcagcctgcggggacgctttcaaaaggagatatggatgtttgctctatctatatcgccttggctaaaaagcaatatacggtagataataccgatactgatacctttattgatttcaagggggataataatatcattgcttatggagaggttcctgtaaaggaatgtgtatctacgaatggggcatggaaggagtttaccattaatctagagtataagacgcaggaaaagcccggcgatatgcaccttatcatcgtggcaagtgccagcaagtatggcgattattttaccgggggagacggtagtgtgttatatgtagatgatttcgaacttatatacgactaaataatatgatgaagcagattgataaattttgttgttgtatattctcattatttctcatgatggcctgtcaggaggaagaaataatggataaaaccgccggctttcaggtatccttgcaggatatgggtgttgccattgagacgaaaagtacgccagcggaattgggaaagccactagcggatcagtttaagcttaaggtcgtgaagaacggggattcctctccgttgtttgatggtaattataccagccagacgatacctgcttcggccggtacttatacgatatctgcttcctatggagataatccggttttagcgttggatgcgccctattatttaggcgacactactaatgtggtgattaaggagggcgagcagaagaaaattaccttgagttgcaaggtggccaatgcgttggcttctgcctctttccccactgatacggagttgaagaaaatcttctcttcttattgggtgaaagtagttgttgggaagtcctcttgtaaattgacttctgatagtaagaaaagtgcctattttcaagcagagaaacaggttgccttttattttgagggaacaaaggtgagcggtaaggatttttccgaggagttaaaacataaggatttgccttcggtattgaaagccggacatcatgttaaactgacattgaagttatcggatgatttattgttggatgtcgctaaagttgaaattaaaaaggagacaataacgagcgatatcccgatggattggttgcctaagccgaaagttgaggcggaaggatttgagaataatatactttcctttgctgagacagagactaaaacggcaatattgaatttaaatacggcttcagcactgcaagacttgaagctgaaatttacttttggtgatccgcaattttcaagcttgaatgataaggactatcttttatctgttccggcagataaagcggaaatggaaaatgtgttaggcattgtattgcctgagattggtgtagataaagcctctttagatttgacttccattgtcgctaagttgcgaacagatgcgggtacgacagtagaaaataagattgaagtagatgtgagagcgaataatcgctggagtagtgaggagattaaagggcaagaaaacccaagccgggtttatacgttgaggtgtaataagccggaaatggcagtatctgttcaacccggaaatatctggacgaaagagtttacgattgatgaactgaccgttactacaggagatccggaggttatcaagtctaagttgaaatatcagtataaagaaaagtccggaggtgatgatacttggaaagacattcaagatatgaaagtgttattcaatgaacatccccaaaatagatcatatcaagtgagagcggtttatcgtgatgtggttatgacggatgctattgatgtggagctagagaatccggtgcagttgccgaattctgggatggaggagtggcatgaggaagatcagagtgatcataaaaatttgtggttcccgttttctcaagatttaagtcttcaatggattactaataatctggaaaccacaaattatagaggagaatccttttgctctgcatctgctgttaagcgttctgaaaataagtataatggtaattatgctgctttgattagaactatagggcatggtgtagcaaatacaaatgtaggttcatttctaggtatgaatggttctattacgggaactcatacaatagggatactgtcttattctggagattttcaagtacgtccaacaaaagtgaaattttattatcgttatattccagaaggagatgatgtaggggtaatagaactaaaaatagaaaatgaagatcaagatgttattttatatgaggctacaaatgttgttagtaagactgaatatcaattatatgaaataccaattaattatatggtagagaatgtagttgctactaagttgactttaacattgaaatctggatctaaacatactaatgttgtaaaagctaaagttagggggaatggagctgatgaacattatggtagcgagctttatattgatgatatttcccttgtttatgacaaataaagataaagaagaatgaaacatatcgtttatattctattaactctcatccttttggcaagttgccaaaaggatgaagcctttgatatttcagaaggcaaaggaactttaatattggaaaatctttctgttcaaacagaaaatgtcaatactgtttctactcgggcagttcagaatgatctatatgtggagatttggcaaaacggtcaattaatgagcgggcaacaatatgaaccgggaaaagtgcctgctaagctggatttgcctgccggaagctatctgctgaaaacctataacctagcgtataaagacatgcccaattgggtagatacagaaactggtggagcagccttttatgctgaaaagaattttaagatagacgctggtaaaataaactatctgaatgtagaagtcccgatggtgaatatcggtgtttccttaaaactcccggaaggttttagtgattgctttaaggattatcattttaccgtacaattcggaaaccgatctgtagaaatatccaatggagaaaccgcttatttcccctcgagtgaagtaacttacattttaagtgtcacaaataacgatggtgaaaataaaacgaattcaaagacgatcaaatcaccagtggcaggaactatatatgaaatctcttatggctatgcgactaaagggttgattgttaatgctaaatatggcttatgaaatgaataactaacggcttcccaagccgttagcttaccactgggggtagccgctagctattcactcgacaagccgtaagttattcacttcacaagctataaacaaggggggtgtcgttctttacatataatataaacgtacgtgcgtacattaaaatatacagtctctctctttaaaggcaaatccaaaaacatatccagttacttttctccccttttggattaaaaagtatcttaactgtatcgttcaacgaaactaagtgtgttggccaagtatcttagtttcgttggccaatgcacctaggtgcaaatatgtattaaagcatatggacaatttccatccctcgtgccccaaccgttattcgcaaattattccttacctttccttgataaaagaagattactcagcgaacaggtataagaattggagatttttatctaagtttgtcagtatacatcaaaaagaaaggaagatcctatgatacctcagataaccattccctatgccgtggctgatttcgctgaaatatgcgaacgtggcttttgctatgtggataaaactcggtttatcccttatttggagcggtataaggctccggtgtttctgcgtccgcggcgttttggaagagcttgttggtctctatgctcgcccattactacgatcgcagtaagtctcatcgctttgaggaactttttggggggacttggatcgggaccaatcctacgccggagcataaccaatacatgattatccgctacgacttctcgaagatggtgatggatagcacgatgaacgggttagagcagaattttaatgatctgaattgttcccccgtggagatcatggtagagcataaccgtgatcttttcggtgattttaagttctcagtgagaggtaatgccaccaagatgctggaggaggcgttggcttatgtccgtatgcgcggcttgcccaaggtttatatccttattgatgagtacgataatttcaccaaccaattgctcacggcctataaggacccgctttacgagtctgtcaccactggcgagagcttcttgcgtaccttcttcaaggctatcaaggcgggtatcggcgagggaagtatccgtacttgcttttgtacgggtgtgctgcctgttacgatggatgacttgacgagcggctataatatcgccgaaattcttaccttgaagcctgacttcacggagatgttgggtttcaatcatgaggaggctgccgaatacctgcgctatgttattcgtaaatatggcaataatgaggatcgtttcgacgagctgtggacgcttatcgtaaacaactatgatggctatcgctttctgcccaacgcacatccgttatttaattccactatattgacttattttttcaagaacttcgccgagctgtccggtggtgtccccgatgagatggtggacgagaaccttcgaacggacgtgaattggatccgccgccttaccatcatcttggagaacgcgaaggagatgctggatgccttggtgatcgatggcgagttgatctactctcaaccggatcttaggagtaagttcaataagcagaagttcttcgatttggatttttaccccgtcagtctatattacttgggcatgacaacgttgaaagataattatgtgatggtgcttcccaacttgaccgctcagagcatctacatgaattattacaacgagttgaatcagattagcgatgacgctcgctgttttgttcccgcttatcgcctgtttatggatcatcggaagctgaagccgcttgtggaaaattatttcaaggaatatctcggccagttcccggcgcaagtattcgacaagatcaacgagaactttattcgttgctctttctacgaggtactgagtcgttacttgagcaactgctataccttcgccgtggagcagaacttgccaagcggccgtgcggatctggtattgacgggcatatcgggcaccgccttccacaacgattgccgagtggtggagttcaagtatttcaaggcgaaagacgctaccatggtagaggccttgaaggtcgttcgtcccgaagatgccgatcaggtgagaagatatgccgctgatatcaatcggcaattccccgcttaccgcatgcgagcgtatgtggtgtatatagcggcaggaaaagtttgtaagacatgggaagttattaatctctaatgtaaaggataagacatgagacatttgttgattattctattatgtcttgatcggcaatatatactatgcgatcgaaagaggaatatatccatccttgaatgatattccaatcttttttatctaaccaaattattccgtacctttgcccctcaaaaagagaacacaaggtatggaaaaacattttaagagaacgctgattactacggcgttgccgtatgcgaacggaccggtgcatatcggccatttggccggggtatatgtgcctgctgatatttatgcccgttaccttcggttgaagggggaggaagtgttgatgattggtggttcggacgagcatggggtacccatcacgttgagagcgaagaaagaggggattacaccgcaggatgtggtggatcgttaccacggtattatcaagaaatcgttcgaggagttcggtatcacgtttgatatctattctcgtactacttccgctacgcatcatcagatggcctcggattttttccgtacattgtatgataaaggcgaattcatcgagaaaacaagcgagcaatactacgatgaggaggcgaagcaattcttggccgaccgttatatcacgggtacttgtccgcattgtggaaacgagaaggcgtatggtgaccagtgcgaggcttgcggtacgtctcttagcccgacggatttgatcgatccgaaatccgctatcagtggcagcaagccggtgatgcgtgagacgaagcattggtatctgcctttagacaagtgggagccgttcttgcgtgaatggatattagagggacataaggaatggaagccgaacgtatacggacagtgtaagagctggctggatatgggactgcaaccccgtgcggtgagtcgtgatttggattggggtatccctgttcccgtggaaggggcggaaggaaaggtgctgtatgtctggttcgacgctccgatcggttatatctctaatacgaaagagttgttgccggatagctgggagacttggtggaaggatccggagactaaaatggtccatttcatcggtaaagataatatcgtgttccattgtatcgtgttcccttccatgctgaaagcggaaggttcttataacttgccggagaatgtccccgctaacgagttcttgaacttggagggcgacaagatctctacttcccgcaactgggcggtttggttgaacgagtatctggtggatatgccgggcaagcaagacgtgttgcgctatgtcttgacggccaacgcgccggagacaaaggataatgatttcacatggaaagattttcaggctcgtaataataatgagttggtcgctatcttagggaacttcgtgaaccgtgcgttagtccttacggataagtatttcgagggtaaggtgccggcggctggcgagttgacagattatgatcgccagaccttgaaggatttcgcggatgtgaaagagaacgtggaacgcctgttggatacctaccacttccgtgacgctcagaaagaggcgatgaacctagcccgtatcggaaataagtatctcgctgatatggagccttggaagttggcgaagacggatatgcctcgtgtcgctacgatcatgaacatcgctttgcagattacggctaatctggcgatcgcttttgagccgttcttgccgtttagcatggagaaactgaacaagatgctgaatgtagagccgttgggatggaatcgcctaggtgctacggatctattggaggccggtcatcaattgggcaaggcagagttgttgttcgagaagatagaggatagcgtgatcgaggcccaagtgcagaaattattggatacgaagaaagcgaatgaggaagcgaattataaggcgaaaccgatccgtgagaatattgagttcgatgatttcatgaaactggatatccgtgtgggtacggttctggaatgtgtgaaggttccgaaagcggataagctgcttcagttccgtatcgacgatggcctggagaaacgcacgatcgtgtcgggtatcgcccagcattataaacccgaggaattggtaggcaagcaagtttgcttcatcgctaacttagctccccgtaagctgaaaggtattgtttccgagggtatgattctctccgccgagaatttcgatggaaagctggccgttatcactccggagaaagaggtgaaaccgggtagtgaggtgaaataataagataaacgcaataatgagggggctatttcgttttaacgacgggatagccctattttttgaatggataagatgctagagaaacagatacagatggtagatctgcggaggcagtatgaacgtttgcgtagcgagatcaatcccgccatgcaaacggtgatagatgcttgtgcctttatcaatggccctcaggtgaaagaattttgtaaccatttatcaggttatttaggtgttccttatgtgatcccgtgcggcaacggtacggatgccttgcaaatctccttgatggcattagacttacatccgggcgatgaggtgatcgttcctgcttttacgtatatcgccgcggctgaggtcgctttggctcttggcctagtgccggtattagtggatgtagatcccggtacattcaatatagacccggaaaagatagaagatgccttgtctgaaaagacgagagctattatcgcagttcatctttttggccagtgttgtgatatggaaccgatcttgcgtatcgccagccgtcataatctatatgtgatcgaggataatgcccagtccatcggtgctaattatactttctcggatggaacggtgaagaaagcctgtacgatcgcctctataggaacgacctccttcttcccttcgaaaccgttggcttgttatggtgatggtggggcgatgtttacttccgacgcacgattggccgaacgactgcgaatgatcgccaatcatgggcaaaaggtaaaatatcatcatgctttggtgggctgcaactcccgtttggataccttgcaggccgctgtcttagatgttaagcttcggtatttggatgaatttgccgccgctcgttgtaaagtggctgctagatacgatgctgccttttccggattggatgctgtacgcaaaccactaaaatcagccttttcatcgcatgtttatcatcaatatacggtacagctagctgtagaaaagagggatcaagtacaagctgcgttaaaagaacgaggcattccttctatgatttattatccattgcctttgcaggagcaagaggtgatgaggggtcgatgccggatttccggggatttgaatgtcgcttctcgcttgagccgatccgtattatccttgccgattcatacggagatgacagaagaggagcaggcttatattatagaatctataaagagtgttttatgaataagaagatacgtttcgccgtgatcggctgtggtcatataggtaagcgtcatgccgagatgattacccgggatgaaggggcggagttggtcgctttatgtgatatccgtccgaaagaggagctggggatcgaggcttatgtggtccctttcgcccgggatatagatgaactattccgtttgggattggatatagatgtggtgaatatttgtacacccaacggcttacatgccgagatggcgatccaagcgatagagagcggacatcatgtggtcatagaaaagccgatggccttgaccttggcggatgccgagaaagtggtttatacctcgttgagattccgtaagcaggtattttgcgtgatgcaaaaccgatattccccgccttcggtctggatcaaggagatggttgagtccggaaaattaggccagatttatatggtgcagctgaattgctactggaaccgtgatgaacgctactataaacccggaggatggcatggcgacgctgccttggatggtggtaccttattcacccaatttgcccatttcatcgacattatgtactggttattcggggatatctgtaatatccagacccatttcgccgacttcaaccacgagaaactgaccgcctttgaggattccggtttcgtgaattttaatttcgtgaacggtggaatgggcagtttgagctactctacggcggtatgggacaagaatctggaaagcagcatgctgatcgtggccgagaatggcagcgtgaaaatcggcggtcaatatatgaatgaggtagaatattgccatatcaaggattatgacatgccggaattggcccctaccaaccccggcaatgattatggcccttacaaaggctccgctcaaaaccacaacttcgtgatccgtaacgtagtcaatgtcctttccggcgcccccggcgagatcataacgaccaacgtcttggaaggtatgaaggtggtggatattatacggaggatttatgcggggaaaagtgtgaaatagcagtgagtagatatgtgaaatcattacaataaggtgatgattttgtgtgtcgctataattatttgataatcagagctccaaaaagacgtgcatgtttctcggaaaacatgtacgtcttttttgaaaagttgctcatgtttttaagaaaacacgtacgtgtttttctatggaagataaagagggttcgaaggataaaaagaatttttacaataactctttgttcccacatcatgtgcggaagatcgtaaatatacataaagcagagaaaagcttcccatttttcactgttagccaaaggtaaatgtttatctttgttgcacttttaccataaatgtcaaatggcggaacaatcattaaaagataagacagcgaaagggctcttctggggaggggtaagtaatggtgtgcaacagctgttggggatgttgtttggtatttatctggcacgtacacttaatgccgaggattatggattggtaggtatgttggcgatatttagtggaattgctagtacgattattaatagcggattttcggtagccttgactaacaaattggatgctactcataaggattataatgcggtgttttggttttcttttgttgtaagcatctgtttgtatattgttctttttttttcagctccgctgattgcgtcattttatgatcgtcaagaactggttaatttatctcgggtaatatttgcgagttttttgttttctggaatggcgattgttcctcatgttatcttatttaagcaattacaagtcaagatgcaggcgaagattgatgtttttgcgttgttcttgtcgggtatgtgcggggttcttttggcattcaatggtttcgcttattgggcattggcaattcaaagtacggtgtatgtggcaagtgcatctttgttgaaatggatggttgtatcttggcgtcctagtcttgatttttcgatcgaacctctgaaagagatgttcccgtttagtgtaaagttgttccttacgaatattttccaacaggtcaataataatgtgttttctgttttgttaggtaaattatataacgctaatgtgttaggctattattcgcaaggaaataagtggatgactatgggaggttcaatgttgaacaatatgatcaattcggtggcgcaacctgtattcgtgcaagtgaatgatgatttggaacgtcagcggaatgtattccgcaagatggttcgtttcgctgcgttcgtgtcgtttccagctatgctgggattggcttttgtagctgaggagtttatctgtgccacgattggcaataaatggttggaaagtgtacctatattacaaatattgtgcgttcaaggggcgataggaccgattatattgctatatacccaagttcttgtctcgcacgggaaatcggatatgtttttatatgcgaatgtgttccatggtatattacaattggctatattatggcttactgcatcttttggtattctttgtatggttgttgcatatgtgcttacttatgtatttatgttatttgtgtggcatcttttggtttatcgattgattcgtgtccgtttggtacaattggcgcaagatgtgttaccttatttggtggttactttgttcgtcttctttgtggtatatgtcttaacgattaagattgagaatctatatatattgttactattgaaaattagtttgtcaattcttttttatgcgttcgctttatggcggttgcgttctgtcgtattcttggaaggcgtgaatttactccttaataaatgtcggaaatgaaagaggtaaagataggaaaggataaaataagtgtcgcattatgtacttataatggagagaaattcattcgtgagcagttgcggagtatcgttggacagacgattctaccgtggcagatcgtagtgtgtgatgaccaatcgaccgaccgtacgatggatattgtaagagagtttgcggatgactatccaagtatccgttggatgattatacggaatgaggttcgtttgggtgtccggcgtaatttcgagaaggcgattgctttagcggaaggtgactatatcgctccttcagaccaagatgatatctgggagagaaataaattggagatcttgttgcatataatgcgtgaaaagaaggtatcgttagtacattcaaatatccgttatgtggatgtgaaagggcgagagatgactgagagattggatttcccttgttcggttccgttagctacatatctttatggcttgaataatgtgatgggctgtacttgtttgttttgtgcgtcattgaaagacatattatttccttttccgattcattattattaccatgatcaatggctggcgattatggcttatcataacggaggtatctatctttgtgatcataaactggttcgatatagacaacatgcggataatgtagtatctgcgatttgtggagggggcaaaagagagggtgaagaattggggctcagctattttgtcggcaaggcggaagacatatatctcttgctgcatcgacgtaagcagattaaatattctcagaaagattggtggcgtttagcttggttgtatgtttcgaatcgattagggctagcgtggttgaaattcaagctgttataatttatgaattagtatgataatatattgaacatagaattgttgaataataaatttcataaacaatggatagtgtggatttgttaaataaatataaagaattaaatgagtcatataaaccgatattggtatatcatgtggggatagatgctggttttttcagtgagtttaatgatttgatttttatgatcctttattgtttggagcataaaattcaatttaaattatactctgatgatgctaattttggaatagaaaaaggttggcaagattattttgagccattctgtgaagaagtgcatgaacgatttcatagaatttataacaggcaccctcattatgtttcatggaggaagatcgtaaatgcggattcttacaaaatgagttgctcattattgcgatggcgattaaagtcagatttactcataggtgtatcaaagtgtatccggtttttccaagaaggaaaatcttttgattattatacgcatgatttgtttgagaaaataagtgtcaagaataaacgatattatgtaccagaactggatattgatggagactatatccaagcttataatgtaatttataacatcatatatcgtttcaagaaaaccgtgaaagaagaaatttgcagtttgatagagggattctccctacctgagcagtatgttggttgtcaaatacgaggaggtgataagtttatagagtatgatttgttatctgttgacttatatttgcgaaaaataaaggaagtgacggatttgaagaacgtgtttgtattgactgatgattatgaaataattaagtgtttgagaaaaatggcaccagaatataattggttcacattctgccaatcagatgagaaaggttattataattctgcgttttcaaaaacagatccactgattaagcgtaaaaggatgattcatttctttgcgtcaatggagttgttggaaagggcctcgttgatgctgggtacgataacctctactccttgtttggttttaggcattagaaaattaggaaatgttcattgggtggattttgaaaagaatgaattctttccgtctatcgattattctattgcaaagaagaaaaccttaacagaacaatttttgaggaggaaataaatgatgttgaaagatttcatggtatgattgctatattttgagaatacagttttgaaagaaagcttatatggttaaagaattaaatattaatataatatctccaattgcggagctttttgagaaacaattgtctttagattgggaatctaggggagttcggtttttttttaattccaaagaggaacggttgtgggacgctattgtagtatatgaaaatataagtgagccttatacgttgagatgccgtaaaggaggattgttttttatctctggtgaacctcctattgtgaaagtatattctcaagcatttatcagtttattcgatcatgtgatatcagcacataacttaaagcatcctaacaatcatcgggatcaacaagctttgccttggtattttggttataacttccaaaccgcttctccgtcttatgcttatgaagaaatagagaaaatggaagttcctgagaaaaaaagaaaaatttcttttataacttctagtcgtacatttttgccggggcatacaagaagacttgcttggatgagaaagatccgtgaactttatggagatgagatagatttctatggaaagggcatttgttccgtagatgacaaagccaaggccttggcttcatacgagttttcaatttgcattgaaaactcgtatgaatatgattattggacagaaaaaatagcagatgctattttggcatatacggtacctatttattgtggttgcaagaacattgatgcttatttcccttcagaggctatgatttctttgaatattaatgatgaacaaggttctattgcgcttataaataatgtgttgaatgattctaaacgtatttatcaggagaaactgccattcttgaaagaggctagaaatcgtttgttatttaaatataatttgttcccctttgtaaaatcatatatagataaatatgtagatttggactgtgatgaatatcgaagtgtcttgattaaaccttatgatacttatccaaaggattggatacaagatgtattgcttaaaacaaaaagagttgtttgtaaaatattttagatatgaatgatataataacggttacttctcctttgattcctcctttagaggagtttatcccttatttggaggatatttggagacgtaaatggttgacaaataatgggtattatcatcaagaattggagagagcactttgtgaatatttgaagattccttatatcagtttattcacgaatggtactttaccgttgatatgcgctttgcaagcgatgcgtattacgggggaggttataactacaccttatagtttcgtggcgactacgcatgcgctttggtggaatggaattaaaccggtgtttgtcgatgttgatcctatgacaggaaatatggatcctgaaaagatagaggctgcaataactccgaaaacaacagcaataatgcctgtacatgtatatgggcagccttgtgacgtggatcgtattaagcaaatagcagacacttatggcttgaaaatcatttatgatgctgctcatgcctttggtgtagagaaaaatggagagtctgttattgcagctggcgatatggctacattgagctttcatgctacgaaggtttataatacaatagaagggggggctttggtttgtcatgatgcggagacaaaacagcgcattgattacattaagaactttggtttcgctaatgagacaacggtagtggctccgggtatcaatgggaaaatggatgaggtacgttcggcttatgggctgatggctctgaaacatgtagatgtcgctatagaatctcgaaagcgagtggcgagacgttatagggaggcgctaaaggaggtcccgggcattcatctttttgaagataaagagggggttaaggctaattattcttattttcctatatttatagatgaaaggatgtatggtatgagtcgtgatacattatatgagaagatgaaaaatgcaggagtttatggaagacgttatttttatccgttaatcagtacgttctctacttatcggggattggattcagcaggaaaggataatttaccagaagcgtataagatggctgagcgggtgatttgtttgcctatgcaccatgctttgagtgaggatgatgtagagcgagtgataggtcaaataatagagtaagatgtttatggattctttttattcacgatctgaattagaacatataggttttgctaccataggcaagaatgtactgttgagccgtaaggctagtatctattctcccgctatgatatcgattggagataatgtgaggattgatgacttttgtatcctgtccggttgtattggaattggttctcaagttcatatttccgcttacgtggctttatatggaggtatgggaatcacaattgaagattattcaggtgtatcggcaaggactacaatttatagtgctgttgatgattttggaggagattatctgattgggccaatgtgtccggtagaaatgacacatgtgatgggaggtccggttgttttgcaaaaatatgttcaagtgggggcttcttgcgtagtaatgccgagcttaacagttgcggagggtagtgtcgtgggagcaatgagttttgttaatcaatccttggcttcatggggcatttatgctggagtaccggtaagaagattgcgagatcgaagcaaaaaattattaaaatttacaaaataacttatatgtcagaaggtaattacgcacctatcattgtttctgtatatgatcgtttggatcatttgaaaaggaatataaaggcattgttaaacaatagattagcggctgaatccctgttgtatatcgtatctgatgcagcttataagtccgagcaccaatcccgaataaatgacgttcgtaaatatgcatcttcgatatctggttttaaagaggttcgtttgctgtttagagagaaaaacttaggagcacatgaatcgattaaatcagcgatagaggaggtattgcttacttatgatacttttatattcttggaggatgacataatagtggcacaaaatttcctgtcttatatgaacgagggactagcctattataaaggtatggataatgtgtttgctgtttgtggatttagtttgccatttcctttacctaaagattataggcaggatgtttatttttatccatgtaactctccttggggatttgctacatggcgggatcgttgggaaaaagtgaatttagattattttgatcgtgaggcagaattgaagaaaaaccgttgtcgttataaagcgtttgtatctattggtttttttatcaaaggtattttgaaggcagattctcggagggtgatagaagcgatggatcttcgtgtatatttccatatgtttcaatgggggttatgctctgtatttccgactgtttccaaaactcaaaattggggctttgacggaacaggagagcattgcggggagaacaatggtacgtggtgggttaagccagaattggatattcgtaatcaaccaactcaatttattccttttaatggttataatgcagagttattaaagaatcatcgtgtttttcaagataagattaatggcggcttccttgcaaagtggctgaaatatacatggatacatgatttgtggaaacgattaaaaacacacacaaattctatctgaagagtacatttgtttaattaaggtttggattcgataatttttagattgctttatgcgagttcttttttatcatacaattccagtagagacgtattttcaagcatggaaaaagggagattatcctggtcatcttctatatggatttactcattttgaaaaattcggtatcaaaagagttagctttgaaataccttttaacccttataagaatcgacttaaattgatgtgttacaatttaattagcatattgtctatgtttaatcaatttgatgcgatttatggagcaacgcatcgaggactggaactggtgatattcttaagagctttagggttgtttagcaaacctatagttatttggcatcatactgcggtaacgaattcctccaataaaatcagaaatattatatcctcattcttttatagaggaatagataaattatttttctttagtcagcctctgttggatgcgtctttgcgaacaggtaagataaaaagaaaagatgcggtgttgacgcattgggggccagatttggctttctatgacagccttttgaaacaaagaaaaagtaaagatttttttatatctacaggtagagagaacagagatcttattactttagtgaaggctttttccgaaacaaaagagatgtgtgagatttatttgggagcgaaagtgggagctgttgattataaatctatttttacaatgcagttaaatgatatactcaaaagtaatgtgcgtattcatttcgtcgatatggagtataaagagattgcgcttatcacgaacgatgcgaaagcgatagtcattagtacttatgatcttccttatacggtaggattaacaacattggtagaggctatggctttgggtttacctgttattacgactgacaatatgaattatccgattgatgtggaggttgaaaaaatcggattgaaggtaccttttggagatattaattcttggaaaaaagctatagagtatgtggcaatccaccctaaagaagctaaaactatgggggaggctggcagatacttggctgagaggatttataacttggaacatttttcttcagaagtggcttcttgcttattgagtgtcagtgataattccgtttgatttgcgaattaaccggtggataagtgaatggattgaaactaagaaaaatagttgcaggaaaataatagataagcgatgaatgtagtgatattaaatacagcagaattaacaggcggtgctgcagttgctgcgaatcgtttgatgaaggctttgaataggtctggtgcgaatgtgtcaatgcttgtgcgggatcaaaaaagcagagatccaagagttgtttcgatcaataattctaacttgagggagaagtttaactttatgcgttttgtatgggaacgtttagtgatttttctctctaatcatttacggcggaaacctttgttccaggtttctattgcgaatacgggaacagatctcagctcccatccattagtccaaaatgcggatgttattcatttgcattggattaatcaaggatttctatctttagatgatataaaaaagttgatacggattggtaagcctgtagtctggactatgcacgatatgtggccatgtacggcgatttgccattattcgttcggttgcgagaggttcaagaaagaatgtggaaaatgtcctttcctaagttcgagcgataaaaaggatttgtcgtatcatgtttttaataagaaacgtttcttagcggattctaagatacaactggtggcggtaagtacttggttaagacaacaagctcaagatagtgcgttgaccaataggttgcctgtagaggtgattccgaatgtgattgacacgagtctgtttgtactttctgataaggcggaggctaggaagagcttatctttacctttggataagaaaatcatcttgatgggagccgcacgtatcaatgatccgattaaaggttttgaatatcttgtcaaggctttatctatattgaaagagaggaaaggagaggaagattatttcttggttttgtttggaggtatcaaaggggatgattcttttttgtcggaaattccgatttcttatgtatggatgggatctttgagtgatccttctatgatcgcgaaattatatgccgcagctgacgtaacggtggtagcttctttgtatgagacttttggccagactattatagaagggatggcttgtggttgtccggcggtgagttttgataatagcggacagactgatattataaaccacttggaaaatggatacctggcgaaatataaggatacggatgacttggctacgggtatcaagtgggtaatcgataatcgagagtctttgcgattagatgaggcttgtatccgcaaggtacatgattgttataaggaatcgattattgccaaaaaatatatagctttgtatcagagtctgtgtaataagcgtgaatagaatgaaagaagaccagcatatcgaatttaaggaatcatggcatgacgaatatactcgttatgtctctgctttttgtaatacgcagggaggcgtgttgtatattggtttaaatgataatgggacggttgttggcatagagcatccagagaaactaatagagagacttcctaattttattgcccagaaaaccggaattatgcctcttgtccatttaaaagagagtaatggtaaagagtatttagagatagaagttcagccttctgctatgccgatttctgtacacgggcgatattatactcggagtggaagtgttacttctgaattgcaggggaatcagttgaatatgtttcttgctgcgaaaatggggctgacgtgggagagtgtggttgaggaagatttctctttggatgatatagatatagaaactgtagaacgttttaagttattagctaaggatagggttccttccattgagcaggaaacagatatattggctttaatgaaacgattgaatttagtagtcggaggtagattcaaaagagccgctgtggtcttgtttggaaagaatgtacaaaaatatgtgctacaggctcggataaagatcggtaagttcctttcggagactgaagtactgacgactgatatcattgagggcaatttgattcagcaggttgatcgggcgttggatatcttgcgaacaaaatacttgttaagttatatatcttatgaagggattcatcggcgcgagaaattagtttatccctatgaggccttgcgggaagccctattgaactcgattattcatcgcgaatattttgtctcttccgaaatacaaatccgtatttatgacgataagttagtaatggggaatgaggctcgtttgcaggatattacggtagaggacttatctaggcctcacccttccagacctcataataaattgattgcggatgtcttttacaaggctggttttattgaaagctggggaagagggacacagcgtattattgataactgtgtagctgagggattatctgctcctgtgtatgagtataagatgggattcttgtatttgacttttatgtctaaacagattgttgaatcgccttatgttgcggatgaaaccttgcgacctttaggtgaaaccttgcgacctttaggtgaaaccttgcgacctttaggtgaaaccttgcgacctttgaatgaaaccttgcgaccttcggatatggcctcaaagagagtccgaagaatgagtaaagcagagatgatggattctatagtagcttgttgtttgaatgcctatttaacgatagaagaaatagcgtctttcgtgaatagaaatcctgcttatataaaaaatgagtttatacctttgcttctgtcaacggggcgtttgacgcgcttatatcccaataccccaaatcatccgaaacaggcttataaaacaaagaaggaaaaatgaatcagcaacctacattttcgatcataacgatcacctataatgcggagcgatggttggagcgtacgatattgagcgtacttagccagtcgtatccgaatatcgagtatatattgattgacggagcgtcgaaggataagaccgtagagatcatcaagcaatatgagtccggtatcgcttcttggataagcgagcctgataaaggcttgtacgatgccatgaataaaggtttaaggcgagccacgggggactatgtgtggttcttgaatgcgggcgatacactttataccgtagataccgtgcaaagaattgtggcgtctttgaaaaagaaagtatctttgccagacgtgatttacggagagacccggatcgttgacgcggcgggcaaatcgttggggatgcgcaggttgaaggctccggagagactcagttggaagggttttcgaatgggaatgttggtttgtcaccagtcgtttatatcaaaacgggagatagctccgttatataatacggattatcgtttgacggccgattatgattggtgcatccaatgtctgaagcgtgcgaaaagagtgcataatacgcatctggttttgtctgacttcttggaggaaggattaagtagcgccaatcggaaagcttccttgaaagagcggtatgagattatgtgcaaatattatgggaaagtctcgacaatcgcattgcatggttggttcgccgtacgtttctattttgccaaatggtttaaaggtagagtataaataattaaatataaataagttttatgcggagtataatgcaaaaatgggggaagcatatcgctgctgtagccgtgttcttggtgctgacagtggtttattttgccccggccgtatttgagggtaaatcgattcgtcagggagacatggagaaagctgttggcatgggaggtagccagatggagaaatatgagaaatccgcccagcccggtgaatttagcgtttggtctgatgccatgtttggaggaatgccctatgcgggaggatatgggaatcctgcccctaagttgcctgggtatactttattagaggcaccattaaaagatatcggttatttgaatgcgggcatggtatttaccggtttggtatgtttttatatattgatgtgtgtaatgggggtgaattggtggctggcccttgcgggctcgatcgcttttgcgttagcttcttataatataatcattatagaagccgggcatataacgaaagcatatgtcattgcctatatgccgctaacccttgcgggtatggcgctcctgttcaaacgtaagtatttgtggggaggaatcgtattcttgttgggagttgccttatccatatcgaatggacatatccagatcacttattatttattgctgctttgtttgtttgtttatctggggtacgtgttcgctaaactacgagagaaaacatacaaagagttaggcaaagtgaccgtgattatggttggttgcgttatattagcgattcttcccaacgctcaaaatatgtatgctcattgggatcttggcaagaactctatccgtggtgctacggaattgactactactacggcttccggagagaaaatctcttcgggcctggataaggattatgcttttgcctggagctatggtaaaggtgagctattgacattgctggttcctaatgcttatggagggggatccggaggtatgttaggaccggactctgaattgtataaggaattaagggcaaagggggctcaagtaggaaaagaagtacaagctcctacctattggggggagaagacgtttacttcgggaccggtgtattttggagcgttggtttgtttcttgtttatcataggaatgttcgtgatccggaacccgataaagtggtggctgttcgctggttcggtgttcttgatttttttggctttgggacgtaattttgatggttttaatgattttatgttccattatttaccgatgtataataaattccgtacggtggagatggctttggttattccgggtatggtatttcccatcatagcgatatgggggctgaaagagatcgtgtcgggaaaagtggatgatgctttatttaaaagggggttaatcgtttctttagcgattacgggtggattgtgcttgatcctttgggtgatgccaagcatgttacttgatttccgttcctcttttgatgctcaataccaattaccggattggtactataatgccttattgatggatcgggcttctttggcttccgcggatgctatgcgctctctgatttttatattgctgggtgccgctttattattctggtattatacggtaaaagatcgaaagaaggctggtacgattgtgggaataggtgtggcagttttgatgttggctgatttgtggactgtcgataaacgttatttgaatgatggtgattttgttcgtcagaaagctgtggacgtgtataaggagactgttgcggaccaagagatctttaaggataaagatccttcttatcgtgtagtgacgttaaataatccatttcaagagactagtgtatcttattatcaccactccatcggcggttactatgccgctaaattgagacggtaccaagaattgatcgaccaccgtctgcaaggagagcttaactcggttatcggggctttccagaaagcgcagaccgcagaggatttgatgggggcgttcgctgcttgcccgtccttgaatatgctcaatacacgttatattatctataatccggagcaaccgcctttgaggaatccgtttgctttcggcaacgcttggtttgtggataaagtggaggtcgtggagaatgcggatgcggaaatagcggcgttgaatacgatcaatccgttaacgacggcggttgtcgataaacgtttcgctgatgaggtgaaaggtttcacgcctcaattggactctactgctacgataacattggatagttatcgccctaataaattagtttatacgacgaagacgaattctgagcaattagcggtattctcagagatctattatcaaccgggatgggaggtaactattgatggtaagcccgcttcgcatttccgggcggattggatattacgagctatgttagttcctgcgggagagcatcagatcgtatttgagtttagaccgcaaggttatattacggcggcttatattacctctttcagttcgttgattatcttgttgttattgattggtgcggtaggatattcggtttggaaagctagaaagcaaaaagagatataaattccggttggttgtagagacggggcacaccccgtctctacaactagatgaaaccgctattgataaaatcgagcagttttctcgttagggtttcccacgagagagctgctttttctttggatatgttcgcagggatggtggcttgctgtgagggggtgaaaagttcctcgataccttgggcgagggccgttgcggatatctcaggcactacgatgcctgtacccggcttttcgatgctgttcttgaaatcgcctacgggagtacttaacataggtaaatcgtaattgtaggctacggatacgacaccactttgagtggcggagcgataggggagtactaaggcatccgccgctgagaaataaatggggatttcctcgtcgctgatatattcacagtggacgaatatacgttcttttgccggagatgcatcgatcagagcctgatagttctcgaaactaccgtaacattcgccggctataatgagatggtaatcctcgttaagctgtcccatcgcttctatcagcaggtctaatcctttataatcccgtatcagtccaaagaatagaagattctttttggacggatggattcctaatttccggcatgcctcgttcttgttgatcttactcccgaaatgattataaagcgggtgtgggttctggatatatttagcgcccgggtaaagtttccgcaaatcataccgcacgttatcgctcatcacgataaagccatggcattgcttgaaaagtaacgaagctaaaggcttgtcgaagaaacgcggctcatggggaatcgcgttgtggataagggtgattaccttacaatgctttttcatccgatttgctacgtgggcgtatccgggaacgaaaaaggacatccagtaagagataatcagtacgtccggcgcataggaacgaatggcgtttacggtactgaaataactaaccgggttgacgctatctaatactcgcacgctctcgatttcgatcgcacggtctcccgcttctacgtattgagtcttgccgggaaataagatatccggataaagacgtttgaagttgaaagcctttacttcatgaccttcttttactaattccgtatagagcatcccgctgaattgggcgataccgccacgatagggataaatgggggagagaatagcgaaacgcatggtaattgaaaattaagaattgaaaattgaaaattaagaatcgagaactacaggagctgccctcccttcattatcaattctcaactttcaatcttcaattaattagtatctgtaatgatcagccttgtacggtccttctaccggtacgccgatataatcagcttgcttttgtgataatgtagataatttcacgccgatacgttccaagtgtaggcgggcaacttcctcatccaaacgtttcggcaaacgatatacgcctacctcataggccatttgccataaatccatctgggcaagaacttggttcgtaaatgagttgctcattacgaatgatgggtgtcccgtagcgcaacctaagtttaccaagcgtccctctgccaataagaagatggagtttccgttcgggaacgtatatttgtccacttgaggcttgatattcgtgtgcttgatattcggatagttgacaagcttatccacctgtatctcgttgtcgaagtgaccgatgttacatacgatcgattggtctttcatctgtgtcatatgctcgatcgtgatgatatcgcagtttccggtggtcgtaacgaagatgttaccctctttcacggcctcttccatggtcgtaacctcgaaaccttccatagcggcttgcagggcgcagatcggatcgatctcggtcacgagtacacgggccccgtaagagcgcatggagtgagagcagcctttacctacgtcaccatatccggcaacgactaccaccttgccggcgatcattacgtccgtagcccgcttgatgccgtccgccaaagactcacggcaaccgtataggttatcgaacttggatttcgtcacggagtcattaacattgatagccggaaccagcaactcacctttctccatcatctgatacagacggtgaacgccggtggtcgtctcttccgatacccctttcatctcggctaccgtacggtgccaacggctgttatcttcttgaaggatacgatttaatgtatccaggattacctgtttctcatgatttccgcctttgcggttgatagtctccgcatcgttctccgcacgatagcccatgtgaatcagcaaggaagcgtcgccgccatcgtcaacaatcatgtgagggcctttaccttccgggaaacgaagcgccatgtccgtacaccaccaatactcctccagcgtctcgcctttccaagcgaataccggtacgccgtccgctgcgatagcggcagcggcatgatcttgtgtggagaagatgttacagctagcccagcgaacgtccgctcccaacgcaactaatgtttcgattaacaccgccgtctgaatagtcatatgcagtgagccggtgatacgtgcgcctttcaagggtttctgatcggcgtatttctggcgtagcgccattaatcccggcatttcgtgttcggcgatctcgatctctttgcgaccgaattcagccaaactcatatctgccactttataaggcagattagttggaaataattgtgacataaattaatactataaatggttgagacgcaaaggtacgaaaaagcgttgatagtaggtgttctttatctatgaatttccatctagggcagaggcttgccgaggggtaggtgggttcgttactgcaacggcgttgcagtattggactctctgtagttttgcgatttaatgaatactgaaggctccatctaccaatagcgcgtggccatctacgaagctcgcttgcgggctgcatagccaaagtacggcgttggcgatctcttccggtttgccgagccgccctgcgggaatgtcgcgcaccagctccttctccaaggaagggtcacgccgcattaagtcttccgccatcggcgtacggataacgcccggacatacggcattgatgcggatattctttgccgcatagtcgatagcggcggtacgtgtcagtccgataacggcatgcttacaggctatgtaggccgcttgccccggaaatcccgtgactccaccttgcgatgaggtgttgacgatggcgccgccgccttgtttcagcatttgcaggatctcataacgcatgcagttccagacacctttcaaatccacagccacggtacggtcgaattcatcgtcggtgatttccgccattgggcgttgcggtgtttgtatgcctgcgttgttaagagccgcatccagtcttccgtaggtagctacggtccagtcgatcatctcttttacggcttgcgtgtttgatacgtcgcaccgatatgctacggccttctgtccctcggctactaatttctctacttgttctcccggctcacggatgtctgccaatacggttatgtatccagccttggcgaaggcttcagcgcaagcgagtccgatacccatcgctgaaccggttactaaagctactttctcttccattgtctttgtcatgatcatttgatttacattttgttattatttatgtcgcgaagataaggagggagtggtatagaggctttgttatgtggttcaaatagctttgttgtgtgggccattataaatattatatatcctcggttggcggtacgccatacgctatcttatagattttcgagaaatgggaaaggttcttgaagcctacctcgaaacaaatctccgagaccttacgcccccccttacgtatcagcccatgtgcggcttcaaggcggcgtcggatgagccattcccggggcgagagagcgctacatttcttgaaatcacgtttaaatgtggagagactgcgtcccgtatagttggcgatttcttccatggaaatatcgttcatataattccgctccataaattccagtatgtctatcttccatggatcggtaaaatcgaagatagaggcatatagattcttgtcggtattgagcaacacatagacgccctcgaccatttttagttgaagcaattcgtctgtcggttggatcttggaattgaaataaggggtcatcgactcaaacaagcttacgatatcgggacggttggacggtagcttgtaaaggcttacctgatctcgcttggcgtctttagggagagtatttcgatctaatttgctgtaaaagtcgcgtaggaacttcatggtgaacatcaagaagatcgccttgaactgctcgccattccatgcttgtttcgtcatctgtacgctgaagtccttgcggatgaaagcgcattctcctttatgtaaccgggtgatttggcctttctcgtcgattaccatctctccggagtatacatacaccaacacatgcgaatgattccggtgcaggcagctctttccgccatcgaaatacatcgctaaaaataaatccgagtaacgcagtgtgttgatcccgtccatcgttctttaggaaaatgggcgacacgggaagatcgtgccgcccattatgaggattttaaagtaactgttaactgtccactaaatcgttaggccggcgtgataccttgctcttgcaatagtttcagcccgaggtctttcaacttgaacttctgtatctttccgcttccggtcatcgggaaggtatcgacgaagaagatgtatttcgggatcttatgccgggcgatctttccgcggcagaagtctttcacctcttcctccgtagccgtcacaccatcgtgaaggatgataaaggcacccacttcctctccatatttcttggaaggaacagcagctacttgcacgtctttcacgccggggaaatgatagaggaactcctccagctcacggggatagatattctcgcccccgcggataatcatgtccttgatacggccggtgatccgatagttgccgttctcgtctttcacgcctaagtcgccggaatgcaggaagccatccttgtcgatcgcctcattggtggcggcttcgtttttatagtaacctttcatgttattataaccgcggttacacatctcgccctgtacaccgacggggcattcctcgccagtctccggatcgataacccgtacctcggtaaattcgaactcatggcctacggtattataacgcacctcggccggatcttcgatacgggagtgggtcatacccggtgaggtctctgtcaatccatacacgctggttacacgcatatgcatcttctcgtccacggttttcatgagttcaaccgggcaaagagaacctgccataataccggtacgtaacgacgtgaggtcgaacatctcgaacatcgggtggttcagctcggcaatgaacatggtaggcacgccgtacacggccgtgcaacgctctttatgtatagaagctaataccaatagcggatcgaatttctcgaccatcacttgcgtacatccatgcgtcaatacgttcatggaagctaataccacaccaaagcaatgaaagagaggtacgcagcaacaaagcttatcgtcggcggtgaatttcatatgctcacccgtcaagaaaccgttgttggcgatgttgtagtgagtcaacatgacccctttcgggaagccggtcgtaccggaagtatattgcatattgacaacgtcgtggcaatttactctcgctttggcagcctctaacgtctcatccttgatattttgtccgaggagcaacatctcgggcgtattgtacatacccctgtatttctcctgtccgatatatactacatttctcaagcgtgggaaacgcttgcttttcaaatacccccgttgagaggtcttcaattccggcaacatggtatagaccatgtccacgtaacttccatcaaacacaccgtctgtgatacacatcgtatggatatcggcgttctcaaccagatattccagttcgctttgtttatagttggtgttgatcgtgaccagtacggcaccgatcttggctccggcatataagaaagtcagccaatccggtacgtttgtcgcccatacgccgacatgtgtgccatgagtgataccgatcgccagcatgcctttcgccatgtcgtccacacgcttgttgaattcgctccaagtgaaacgtaagtcacggtccgaataaacgatatattccttgtccggtgtagtctcggcccaatgttccagccattggccaagggttctgttatgtaattccataaaacgctggatttaataaggtgtatagacaactcctaggattcgggccttgttgtcggctgccgcatgtacatgatgcgccacgatggaatcataatagatgctatcgccttcctctaggatataggtgttctttccgtaattgatctctacgacgccattcaatacgtagataaactcctctccctcatgcgtggacaggatgaaatcctcgccttcctcggagggagcgatctcgatcaagaagggttccatatggcggccggacttatcttgcgagagcgagtggtaatccatatgcttgtgcccttgtgtcgcgttgttcgtgaacccgataccatcggcctcgctgtcctttttgcggcatacgaccgggcctagctccgcttggtcatccaagaatgtacccaaacgtacccctaatacccgtgctattttgataagaggggccaaagatggaaaatccaagttaccctcgatacgttcgatctgttcgatacctaacccggagcgttcggctacctcctcgatagagagttgtttcgattcccggatatttttaattttcgcgcctataattttgttgtttcccatgtgtatgatttgttatttatagtcctgtaatgtttgataatttgatactaaacggcgcaaatttacattaatattttattatatctaggattaagacaaataaaaagggcaatacccatttgggattgccctttttaatattttcgagtaagctttttcttactttctgataccaagttctttgatgatagcgcggtatctctcgatgtcagtcttgatcagatagtccaataaacgacgacgtttacctaccaacatcttcaatgatctttccgtagcgtaatctttgtgattcactttcaagtgctctgtcaagtgagagatacggaatgtgaacaatgcgatttggctctcagcagaacctgtgttagtagctgatttgccatacttttcaaataattcttgtttctttgctgaatctaaatacatgattctttttactttaataaattaatactatgttatctaagcggtcgcaaaggtaggcattcctttttgatttgcaatagattctgctatcttttttgtgttttgaagcatgaatgtcatatatatatcgtaaaaatatcgtatttttgcagccaataaattagtcttcaatgcaaaagatcagaaacattgcgattatcgcgcacgtagaccacggcaaaacgacgctcgtggataagatgttattagccggtaagcttttccgtgaaggacaggcagaaccggatcagttcatggataacaatgatctggaacgggaacgaggtatcacgattcttgccaagaacgtgtctatcaattataagggatataagatcaatattattgacactccgggccacgccgactttggtggcgaggtggagcgtgtcttgaatatggcggatggttgtttgctattggtagacgcctttgaggggcctatgccgcagactcgttttgttttgcaaaaagcgattcaactgggtttgaagccgatcgtggtaattaataaggtggataagccgaattgccgcccgtcggaagtgcaggaaatggtattcgacttgatgtttagtctggatgctaccgaggagcagcttgacttccctactatttatggttccgccaagcagggctggatgtccgaggattggaaggagccgaaagaggatatcgcggctgtgcttgatgcgatcatcaagtatatccccgaaccaaagatgttggagggtactccgcagatgttgattacttctttggattattctaagtatgtaggtcgtatcgccgtaggacgtgtacaccgtggcgagttgaaagagggccaagatgtcatgctttgtaagcgtgatggtagtatggtgaaatcgaggatcaaggaagtggatgtattcgagggcttgggacgtacgaaagttgattccgtgcagtccggggatatttgcgctattatcggtatcgatggtttcgagatcggtgagacaatcgccgacgtgaacgagccggagccattgccaacgatcgctatcgacgagcctacgatgtctatgcttttcacgatcaacaattctccgttctttggtaaggatggtaagtttgttacttcccgtcatatttttgaccgtttgcagaaagaattggataagaacttggctttacgcgtagttcctactgattccgctgattcttggttggtatatggccgtggcgtgcttcacttgtctgtattgatcgagacgatgcgtcgtgagggatacgagttgcaggtaggtcagcctcaggttatcatcaaggagatcgatggtgagaaatgtgagccggtagagcaattgacggtgaatcttccggaggaatgctctagccgtattatcgatatggtaacgaagcgtaagggtgagatgaccatgatggaaagcaagaatggtcgtatgcacttagagttcacgattccttcccgtggtattatcggtttgaacaacgccgtattgaccgcctctgccggtgaggctatcatggcacaccgtttcttggaatatcaaccgtggaagggtgatatcgaacgacgtatgaatggttcgattatcgctatggagacaggtcaggctttcgcttatgccctgaataacttgcaatcccgcgggcgtttcttcatcgccccgggcgaggaggtttacgctggacaggtggttggtgagcataccaaagacaatgacttggtggtaaatgtcaccaaatccaagaagttgacgaatatgcgtgcctctggttcggacgacaaggtttccttggctcctcctatcgtattcagcctagaggatgcgcttgagtacatcaagggcgatgagtacgtagagatcaccccgaataatatgcgtatgcgtaagattatcttggatgagacagagcgcaagcgccaaggtagataatatattcttctattaatagatacaaaaaacggcgggcctttaaaaagcccgccgttttttatatgatgttaggattttagagatccttcaatgagtgtgtatccttcattctttattttccggatctttcttctcttcatccggagtggtaaattgtatcactaacgattcatctttaggagtctcataccaatctccatgtgcctttcggtaatcttggtcaaaattataagcttcgtcgatgcttttattctctatacaccaacggaaaggttgattttccgaataaggaatatccaatacatatgggtatagatccgtattcttgacgtttttatttaccggtcccttcccgttatcaatgtaaggcatgatcagctgagtcgcactatatgttaatgtctttgtaatcccactttccggttccttgtcgaattttctcacattgacatatccattgacatcggagaaaaagggagttagtccattggcgtccttaaatccaaattggttgtggaatgtacagcctttagccagtaactgggcataaacatctgcggtactcttatcggtatatgctgtgatgctataatatatgacagcgtcattgaaatcgaaatcgccttggtttggataattatcttcgaacaggaggaatcctttcttgttcgtttgcgattctatgacgggaggggttaccggctctgccggctcgatggcaacgggattactttcgattagacaaagcatatcgttgtagtctccatcataggccctatagtttgggcagcgattttccattcccagtacatttccttcaaaatcaccttcttgaatgtggtgaatgaagccgtttgctacgtttttctctattttgaaagaggaattaccatattttaaggtatggcctacgtaattatgggagaatgtcccattatctggtactttattgttatccggcccatttaatgccggagtggagaactgtggacggtctgtgcctcgatatacgaagccgacgttgagccccttgtcgaatcttcccaagggtattcgggtatattctcctgcttgggcctttggctgttcttctttggagtagaatatataattatcgccttggttgatcgtattgaagtcagtgacttggatagcaccattagtctttccatagaaggtgcagtcatctaaagtaaggttctccatcttctcggagggatatgtatagaaccaaattttaccatgcatattactgttgcctttggacattcctccatcgcttatataggttagccaaatatccgctttctcaaagctactggtaaaaacggtttccgtgatttttagatcagagcatctatataaatcctcgctttttacattgtatgctttttctggaaagtatttgttattgatcagatgaaggacttcatcactgatcgcatttgtagcccgtaagctgcttttggtatcgcttccgatcgtgatgtcctttacatcgctctcgataagttccccatcccctcttaggatatagagtttctttacgtgtgtaggtacttccagagccatatggatcggagttttaccaattaaataaggatctttgactaaagagccttcctcataaggatattcataataaatagaatatagggtcccttcatgctgagaagatatgctaacctgtatgttctcgaaattctcgaactgggctatgtaatcttcttcttctttggtaggttcttgaggatctaccgaggggtcttctccttgataaatgtcatgcttaacgcatgattccataaggaagagcagacaaaatacccacaccatttgtttccagatttgtgatctcataatttctttaccctatttgattaatatttacaacaactttattgaattttgcaaatctacggatttattttataaaaaagtcattgataatcaatatttattttgaagtgttgcaatattctgaaatataggcttgagtgggtggaatataaaaaaaccccatccaaaaggatgaggtctttttcttatttagaaagaatattttctaattattttactaaagctgagaagtcagagttagtcgcatatttagcgaactctaagtcgatagcagcttccttagccaagctcttgtcagcagcgatagcggccttcaagttgcttactacaccgttagcgtcgtttgtacgagcagcaacaacagccttcaagtaagaggtgatagcatcaggtttagcaacaccgttcaaagtctgagaagccttgctgtaatccttaaccaagatctgagccaaagcagcgttgttagtcttaacagaaccgaaagagttaacagccttagcatattcgccttgctctaagtaaagaacgccaagagcctcgctcaattcgtttacgccggcagcgttaccgaacaattgttgagccttagcttggtcacccttcgttaatgcgatcaaacctaagttcatgttagcggaagcgttattcttaacagagttagacttgttaaacatttgctcagccttagccaaatcaccagccttgaatgccatcataccgatgttgttccaagtgcggtagcagttaggatacaattcagaagcttttgtatagatagccatcttttcattgtcgttgttcgtcaatgtagcggcgtaaaggatttcctcgatattcaactcagaaggattgctcttagccaaagcgctgatctcgtcgtcagacttaccgatgatctcgatgttagcggtcaaacgagaacgacgtaattgcggaaggatagtctcagccaagtcagagtaaacagcggagatattcttgatttctttctctcttgtctcaggatcttggtacatagagatcacacgcaatactaagtctttatcttgcaagttagaagcagaaactaattccttgaagccttcccagtcttgagctgtgtaacgagcgtcaaccggagcgtcaactttcatcttcttcaattccttgttcaaatatttagaagtgttaccttcacgattttcagccaacgtgttgttcaatttgaaaccaccatcaggagaagcgtaagcgctgatctcgatagctacattctggttcggagcctcgtctgcgttcttaacaagatctttccattctttgatagcgtcagaattcaattcttgagcgcgaaggttagcttgttggatcaagaacatgatgttagcgtcatgagcctctttgataatacgttggaatttatcagctgcgatagctgctgtagcagtagctgcgtctgccaattcggaagtagcgataacgccttcaccgatctttacgtccggcaatttaacagtcttgtttttgatcttcgcgtcgaaagtcaaatacaattctgattttttcatctcgggtttgtaagtgaaagaagacttcatagttacgttagcgccttctttttgagggattacttggttgttaccttttactttctcaccttggtaagtgtaagaagtgccccaagcttcgccaccctggtaacgcaataccggagttaccgttacaacagctttcttgttgaaccatttagcggggaaagtcgcattgatcgttacaggaactttgcctccgatagcctctagcggctgcggctctgctttaatgtactgttctgccaacggtttcaacttgtttgaacaagaagaaagagttaaaatggctgccaatacgaagaatggcaataaaaactttttgttcataatcttgatgtaagtttaaaatgttactatgttaatatattcacttccaaattatcccttagccattatcgtgcaaaactaaagtatttttttgttatggatagcaaagaagcgataaaatctttttaattaatacttattaatgaatcctaggcttgttttatacataaaatatgggtagaattattgaaaaaatatggctgtgtacctcttgccattcttttcaatggatggtttcccagaactcttattgtatattttttgattaaaatataatcttttgtgtataatgctcctcgccataatgcacggttagaaagtagactccagatgttaattttaggaaatggagtgtagcttgcctgtccgtgatctctccgttttccgacacttttccttgtgccgagtgcagtgtataagtcgctttctccattccatccggcaaaacaaggtgtaccatgcctttctccggaccgagatgaatgagtacctgctcgttcgcctcgagcttttcgttgctgacggggttaccgtattgaatgacgggatcgataaacaaggaggtgctaaaacctgcttgcgtatattcggtagcttgtctccagccgtttttatcatgaacccaagccgtattccgggtcgttttgcctttgggcaaattgtaagcggagaaatacgtgttctccgggacgctcttgagcttatagccgatgtagaactttccgctgacgttcacgggcttggagaaatggatataactttcctgtgaccgatttagggatttagcggtctcaataaacgtatcgtccaatatcgatttattgctataggtgggttggaatgtctccgtatataataatgtagagggcttagagtcgccgctgtaaacggtaacttccacttccatctgtttgtaattcgctccggcaggcggtgttacgaaataagctccgtataaggtacccgcttcggctacttggtaagcttccgcgtattcagtgatattggcggggttgttcccgaataaatacgctttttcagacccgggatagagcgtacattcggcgttttcttgattaccggagtcatagatgttgctcaaccggaaacaaggggctgatttatacggatcaagtccctcgcaaaccttggtttcgtcattggacgggttcagccaatatttgagctgtctctcgggggtatcgattgcgtcccatggtttcatcaaagagaagaagtaatcatccttcgggctattctcgctggactgcccgccggataacgctccgataatctctccgtcggcattgaataaaggagatccggaggaaccgctggccgtataacctacttcccaagtcttgacatgccaatgagcgttcttgtaaaaaatcatgtttggatctgtcaaggtaaagggagccagatcctcatcggatatactgattcgctttaccgagtattggggatgttggatgcacgtatagggggcaggtcctacctcttgtgcgttccagcccgcgtaataaggcctgtaataaaccggaggtgtggcggtaagttccaacaaggccatgtctgccatttcattaaccgccttgaagtaagtggatgcggtagacatctcttccgttccccttaggatcgggtcgcagaaagggctgttgaagttgaaaaagcagacgatacttccggctattttctcataatcggggtttttcatcgtgaattgcttgttcaggcaatgggaggcggtgagtagataaggctttccgtcattgtccgtattatttatcagggtgcccgtgcaccctacgcttccgtctatgatcaggagaacgacgctttgcccccattgggcgtaatcgtttgtcccatcttgatagcaagctaacggtggaattttaccgatcagtgaggtgttgtctcccggttctaacccccgcaagctccggtagccatggttgacttccccgacggtcagtcttccttgaaaagaggcgttagccggttcttgatattctatgatcaggcgatccccttggataggagagaccggcaataggtttaactccgagttgtttaggtgattgaacgagcctaatatctgtgtctggtcctcattatataggaagagctgggcgccttcgggcagttcatattccgtgaagagcacgttgatggaaagggccccgggcgagtagatcccgagtctccatacacgtgtcccatccggcccggtgaaagttacgcccgagttgtaccgattgtaatccgttatgaatttataggcaaaacggaaaccgcttcttaggtcgctctcattcagcgagtcgatgcgtaactcctcttggacgtcgaacggaggcatttctttaaacatctgtccgtttgtacttcgcatgagcgatagcggaagcgggcggcctccgtggctaacctgcgctttcagatttccttgaaaaccgagcatcgttagcaggaatataatgtataaagaggtcaactttttcatatcgggcaaatataactatatttctttaccccatgatctatatatcaagttttttcgctaagtttgccaatcgaaaagtacggacaaacttaaataaaaccaatatataattaaattctaaagatatggcaacacctccgtttcactacgagccgatgttccaaaagggaccggacacaacagagtattatttgcttacaaaagattatgtttccgtttctgagtttgaaggaaaaccgatcttgaaagtcgctaaagaaggtttgaccgctatggctaacgccgctttccgcgacgtatcattcatgcttcgccgttctcacaacgagcaggtcgcaaagatcctaagcgatccggaagctacggacaacgataagtacgtggccttgacattccttcgcaacgccgaggtagcggctaaaggcgtacttcctttctgccaagataccggtacggctattatccacggcgagaagggtcagcaggtctggaccggttactgtgatgaagaagcgctttccttaggtgtttacaagacctacacggaagagaaccttcgttactcccagaacgctccgctgaatatgtacgatgaggtaaatacgaaatgtaacttgccggcccagatcgatatcgaggctacggaaggcatggagtatgagttcctttgcgtgacaaaaggaggtggttccgccaataagacttatttataccaagagacaaaagcgatcttgaatccgggtacattggttcccttcctcgtagagaagatcaagacattgggtacggccgcttgtcctccgtatcatatagcgatcgtgattggcggtacttccgctgagaagaatttattgacggtgaagttggcttctacccgtttctatgatagcttgcctacgaccggtagcgagggtggccgtgctttccgcgacgtggagttggagaaagaggtattggccgccgcccagaatattggcttgggcgctcaattcggtggtaaatatctggcacatgatgttcgcatcatccgtttgcctcgccatggcgcttcttgcccggtaggtttgggtgtaagttgctccgcggaccgtaatattaaatgtaagatcaataaggaaggtatctggatcgagaagttggatagccatcccggcgaattgattccggaggaacttcgtcaagcgggtgagggcgacgctgtcaagatcaacttgaaccaaccgatggcggatatcttgaaggaattggataaatatccagtatctactcgtttgtcattgaacggaacgatcatcgtgggccgtgatatcgctcacgctaagttgaaggagcgtctggatcgtggcgaggatcttccccaatacatcaaggatcatcctatttattacgcgggcccggctaagactccggcaggtatggcttgtggctctatgggcccgacgactgcgggtcgtatggactcatacgttgacttgttccagagccatggcggtagcatgatcatgttggcgaagggtaaccgtagccagcaagttacggacgcttgtaagaaccacggtggtttctacctaggatctatcggtggccctgcggctatcctggctcagaacaatatcaagagcatcgagtgcgtggaatatccggaattgggtatggaagcgatctggaagatcgaggtagagaacttccccgcgtttatcttggtagataacaagggtaatgacttcttcaagcagatcaagcctcgttgctgattccttgatcggtaaagataaatgaaaagcggtatccggcggcaagctggataccgcttttttctaaaaaaaaagtcgtacgtgtttttttaataggttaatcccacgatccacagcggtagtttcttgccggtggcgaactccatattgtcagccaagatgaaggaatcggggagatccgctatttgcttgaatgttttatccgctcctcctacctcgaaggtataggtatggtctacgataaagtcaccttttgtttttccatattccacgttatgatttacggataactggttgacgacaaaagtttcccttgccgtcccgatctgtacgggagcggaagctatggcgtacaataggttgggattctgtaggtaaatcttatccggtttttgcatctttttgacagatagtaaatccgagtacaataacttgagcaattccgccttgtccaaattctgtaagtaattgatgacagagtttcgggaaagtccgatcattcccgctagtttcgtgatgtccagctcataaggaacagaggtagctaagatacccatcaaagcctttagcttccgtgtataggcaggatctacgccacacagcaacgggagttcctgctcaataatgagattgaccacattctcgatattaatataataatcttctctgttacccgtaaaaaaggggtaatacccttcgtggagatattcgttaaacatttgtacggggcgacatttctcatttatttcccggcaaatgtttcctggattttccagtatcgtttgtagggaatagacaggtatatcaatttgcttatagaacatgagaaattcccggaaggaaagtccgtacatattatatggtaggcaacgtctggaaagatcggcatccgcattcaatatattcaatagggaagaaccgctaaaaacaattcgtagagatggatacaggtcgtaggcctcttttatctctttactccaagtgggatatttatgtacttcatcaaggaataattgttttcctccttgcaaatagaaccgctcaatcagttcagatagggtgtgattactgaaatagatgctgtcgagcgtgcaataaagtacctccctgcttcccggctggaaattcagtttgatgtattgcaacatgagtgttgtttttccgacaccccttgatcctctgatggcgatcagaggattatcccagtgaatttggttcatgagttcccttatgatatgggtactcgtttgtgccaataatcgttcttgtttaataaatagactatccatacgctgattgattgaatgacaaatatacgatttattcaagatagatagcaaaaagtacatggatttgttaagggcaaaaagcaaatctggtatttttttgttaagagtaagaagcaaaacctgtaagtatccggtcgtagcgtactttgcgtattggctttcaaaagtttgtataaatatcaatgaaactattacactttaattttttacctttgttgcgtttaagtgataaaacagatttccaatgcctcgtatatacatcctcttgatgtcggtcttgatctcggctttttatgcttgcgatcatcgggggaagccttaccccgctaccctgtcacggatcgaatcccttgcggatacaaatccggaggaagcccgccctttgttggatcgattgcgggatagcctttcgtactttgatgaggaacagcgtatgtattatgacttgctcgacttgaaggtcaatgataagatgtatgtccggcatacttctgattctttgatcaaacgaatcaccgctttctatgagacatatggcgatcgagacaaattactagagtcttattactatatgggccgtgtctaccgggatttgaatgatgccccggaagcgttgaagtatttccaaaaggcattggatgtggcgggggatacgagaaagtaccgattattgtccaatgtctattcgcagatggggatgctttatgattatcagaatgtatatgaagaggcgatccgtatgtatgagaaagcggctgagtataaattactgaaaggagatagtactagtttttctcttgtgctgagagatattgcccgagtatatgatatggtcgataagaatgacagtgcgcttctctattttcaaaaagcggcaattatagcgaatgaaacaggaaatagacatcgatattccggtatattgactgagctgggtgatctttaccgggaattggtaatgtatgataaagctttggaatgtttgtctgaatcattaaaagattccgtagaccggaatatgtatcctacttattcggttttggggaatacttatttagaactcaataaattggattctgccgattactatttaagaaagtgcctggatagtcctaacttacatgttagagacgctatttatgagtacttgtcgcttttgtatgagcgtcggttgaattatcgggaggctattcgctatgtccgtcttggccagcaagtgcaagattccatccgcaagataaccgattcggaggaaatccgtaaaatgacctctttatataattatcaaaagcgggaaactgagaatttacggctaaagggcgagaatgaccggatgcagattcgtatttaccggatattatccttgttcggattggggctttcgataaccttattgtttatatatagactgaaacggcagaaagagcggttggctaggcagtttgaggcgcttcagcgggaaaagcaagaacaatatgagagaagttttcaatatgtagaagcgaataacgcgaaattgaatgaattgggaaccttactatctaaagaccatgaagatacaaattcattgcttcatgtgcgaaaagaacttttgcaagtgaccaatgaacaaatacagttgcggcgtaccgagcgtgatttgttagagtcggatttaaggcattcggatatctatatgaaattccattccacgaatgaggcagatcagataatcagggaagaagattggaatgctttacggaaggagttagataagacatacaataattttacgaatcgtctatatcagttatattcgggaatgtcattgatagaactccggatttgttacttgataaagatatcagtcaaggtaactgatatggcaaaaatcttgggtcgctccaaaccctccgtatcctcatcccgtaaacggctttataaaaaaataaagggagaggatggaaccccgaatgaactggatgaattaatcgctggtctttagccttatacaactctgcgaacaaaaagcgaacaaaaagcgaacagtgttttagccccgaatccaaccttatcggatacttttgcagtcaaaaaatgaatgggatgaaaagaattttacttttgactttgttgagttgcgtgggcttgtgtacacaaatattgagtgtttttgcccaacaaggagagaaaagtgtcgggataaatgtgggttacggcacagcaagtagttttgagtcgtttcgcttaggtgctgagttcaattggaacgcaacggatcatatttgtttgtcgccttctttcgattgctattttgccagtagtacctcttatgtggttagtgcggatgtacattatttatttccgataaaaaacacatggcaggtttatcctttgctgggagtcacttatactcatttcatgactaatgaatttgggggaaatattggagctggtgtggaatatccgatttcctcgtctttttatgtaagtgccgaagggaaataccagcttacgaaggatttccagcaatttgctttggcggcaggtgtagcctataagttttaataggtcatttgatacatcgttcgacggagtataaagactaaattcgttgggagaacgagatataagaacttcttaggagatggtaacgtcctataaaataaaatcccggatagcgtttaatctacccgggattatatattaatgtataagaccttacttagtctctgtactccctgcgaggttcgcaatcattacgatcttgatgaggaccacggtctccagacgcttccagccgatctcggaaatgtgaagcagatcatccttgcccgatataaactcaacgaacgtaccgtaaggtataagagaagcgttatccctcaaaaggcatgtttggcaacatgatcctaaattatcagtagtacttaccttgccaacgcagtatatcttctatgccacttgcagtatatatcccatggataagtaagtagtactgacttttccggcatgagaaaagcgtttcccttaggcgaacaaatagtttctcctagggaaaactaaagtttcgtaagcacaaaactaaggtttcctcatgaggaaacaaatgtttccatagcggaaaacttttgttttataccaagaaaaactataaatgtcaattaatcagttttttagatgatatatgaagcatgaccaaatagatagcttgccggctaagcaatgtctccgtcttcggtcgcttcttgaaaaagataggactaataatacggttggcgagtaggggacggtggtgttttgtgattgaaaagtagtaaatggtggtagatacgagccgatagtggtagatgctatttatctaccaccacccgataaataacttatgaccaattgattatagctatagttgtaggtgtggtagatgatttgataaaaaaatcccggatagtgtttaatctacccgggattatatataatgtataagaccttatcttagtctctgtactccctgcgaggtccgcgatcaccacgatcctgacgaggaccacggtctccacgatcttggcgaggtccacgctcacctctttctggtcttggcggacgttcctcgtaaccttccggtttcggaagcaataccttgcgggaaagtttgaacttgcctgtcttcggatcgatatcaaccaacttgacagaaaccgtatcgccttccttcaagccggcttgctcaacggtctccagacgtttccaatcgatctcggaaatgtgaagcaaaccatccttacccggcatgaactcaacgaatgcaccataaggcatgatagaggaaatctttccttcataaacctctccgatctcaggaacagcgacgatagccttgatcgccttgacagccgcgtcgatcgtagccttattcgtgccggagatctcgatctttcctacgccgtctacctcatcgatagataccgtagctcccgttttctcttggataccttggatgatcttaccgcccgggccgattaccgcaccgatgaattccttaccgataatcatcgtctcgatacgaggtgcatgaggtttcaaatcctcacgagcttccggttgagcctccaatatcttgcccaagatatgcatacgaccctctttagcttgagccaaagcattctcaaggatctcgtaagacaaaccgtctaccttgatatccatctgagttgccgtgataccgtctttcgtacccgttaccttgaagtccatatcacccaagtgatcctcgtcgcctaagatatcagacaagatcgcgtagttcgtacccttgttctcggagatcaatcccatagcgataccggataccggtttcttcatcgggacacctgcgtctctcaacgccaaggtaccggcgcaaaccgtagccatagaagaagaaccgttagactccaagatatcggagattacacgtactacatacggatagttgtccgggatcatacgtttcagcgcacggtgagccaagttgccgtgtccgatctcacgacggcctacgccacgtgttgctttggcctcgcctgtggagaatggggggaagttataatgtaaaaggaaacgctcgtatccatggttcaatacgtcgtctatcattttctcatcagacttcgtacctaaagttaccgtagataaagactgtgtctctccacgtgtaaagatagcggaaccgtgaggacccggcaggcaatctgtctcgatccagatcggacggatctcggtagtcttacgaccatccaaacgcttaccctcatcaaggatggcacggcgcatagcctctttctctacatcgtgatagtagcgaccgatcatttccagtttctcgtccgtcaactcctcctcggagaattgagccttgtattcttctacgattttctcgaatgcctcgctgcgttcgtgcttgccgctaccagatgtggctacggcgtaagccttggcgtaacatttgtcgtgtacgtccttgcgcaactcgtcatcgtttacctcgtggcaatattcacgttttaccaatttgccgcaagcctcggataattccaattgagccttgcattgtaccttgatagcctcgtgagcgaccttgatagcctcaagcatctcagattcctgaacctcgttcatttcaccctcaaccatcatgatgttgtctatggtagcggcaaccatgatgtcgatatcagctttctccaattctgcggaagttgggttgacgatgtattttccatccgtacgagctacgcgaacctcagagatcggtccgttaaaaggaatatcagaaactgccaaagcggcggaagcggccaaacctgctaatgcgtccggcaaatcttcgccatcagcggagaacaatataatatttacatatacctcagcgtggtagttgtctgggaaaagaggacgcaacgcacggtctactaaacgagatgtgaggatttcataatcagaagcttttccttctctttttgtaaaacctccggggaaacgtccaaaagcggagtatttctctttgtattctacttgcaacggcatgaagtcaacacccgggttcgcgtctttagcggcacaaacagtggcgagcaacacggtgttgttcatacgaacggtaaccgctccgtccgcctgtttggccaatttcccggtttcgatggtaatggttcttccatcacctaactcgatcgtcttgttaattggattaagcataatcttttttcttatttttctatctgtcaaaaattggtgcaaatgtaatgaaagtttacctgtaattgcatgaaaatgaaaagaaataacagtcttaaagcactttttttgaaaaaagccttgaagaaatacggaataatagtgccacaattgtaaaataatgtatatttgcaccggattagtaatatagacaaactggaataatgaaacaaatatctacgaatttactagctgtgctgtgtgttatgttgcttttgttcacggcttgtaagaagaattctgattttacggtggaaggtgtagtgtccggcgcagacggccagatgatgtatctggagaatgtaggtgtgtcgacggtagagttgatggactccgtaaaactgacggcggccggtaaattcagctttacgaagcctcgtccggcattcccggatttttatcgcttgcgtctgaataaccaattgatcaacttctcggtagattctacggagacgatctcgttcgtggccgatgccgggactttcgctacttcttatagcgtggagggctcagagaattgcaaggcgatcaagaatattactttggctcaattagatgcgaaccaagcgatccatcgtttacggaaagaatctgagtccggtctgttggcggattccgtatattcccgccaggtgctcgaggccgccgaggcttataaggacgtggctcgtaagtatatttattccgccccgatgtccgctgccgcttactttgccttgttccagcaaattgacggcttgctgttcttcgatttgtatgacaagaacgactcgaaggcttatggcgccgtagccaccagcttcgatcactattatccggaaagccctcgtgctaagcatctgtataacttggctcttcaatcgataaaggtgattcgtagccagcgcccgatggacttggataaggtggagaagaaagaggttagtttcttggatatcgagttgccggatgtacatggggaaaacacgaaattgtcttctgtcgctacaggtaaggtggtgttgatcaacttcacggcctatatgtccgaatggtctcctgccttgaatatggaatttggcgatttatatacgaggtaccacgataagggcttggagatttaccagatctctttggatagtgatcttcacttctggaagaacgccgcttctaatttaccttgggcttgcgtgcgtgatccacagtcggtttactctcagaccgcggcgttgtataacgtgaaacagcttccggcgatctttatcttggatcgcaagggaaacttggttaaacgggtggacgacgtgaagaaacttgaggctgacatcaagtccgtattgtaaattgttcatgatttaatcatcagatttatatgttataaagcactttcgtaaacttgttcatcttagaaagataacctaactttgcggagtcttgaaatgataaaaaaggggagttccggccatatgacttggtcgggattcttttttattatgcgataatcaatcaatattaatataaagaataaggaggatttagtatggctgttagttatatgacaaaggacggctacgataagattttagctgaaatcaactatttggagaccgtgaagcgccctgaaatatcagcccagatcgctgaggcgagggataagggtgacttatccgagaacgctgagtacgatgccgccaaagaggctcaaggtatcatggaggctaagcttgcgcagttaaaaggtttgatctcaaacgcccgtctgatcgatgagagtcgtgtgaaaactgatgaggttcagattttgaacaaggtgaaaattaagaatacgaagaataacgctgtcatgacctacacgttggtatcggattcggaggctaacctaaaagaaggaaagatctccgtaagcacgccgatcgcccaaggtttgatgggaaagaaggtaggggatgtcgttgagatccgtgtgccttccggcttgatgacgtttgagattatggatatttcaatttaaaaacagaaagacgtatggcaactattttcagtagaatcgtggcgggtgagatccctagccacaaggttgcggaagacgatgagttttttgctttcctcgatatcaatccggtagccttggggcataccttggtaattcctaagaaggaggtcgattatatctttgatatcgatgatccgatgctgggacggatggtagctttcgctaaacgggtagctcgtgctcaagagaccgctatcgagtgtaagcgtgtaggattggctgtcatgggtttggaagtgccccatgcgcatatccatttgattcctatcacgaaggagtccgatatgtatttcggcgggaagaaattggctgtaagtcaagaagaattggccgagatcgccgctaagattagaaaagaattcaaataattgaatataattttttaattataaaaaattggttatatttgtacccgctgttttatgcgtgacaatatcatgcaaaggggacagcaaatcattaatatgattcattagtggtttttactcataaatttgttaaccttagaagaaaggcccctctgtgacagagcggccttctttttttaaacacacaataaacattataaactactaaattgatatcttcatcttacatcttcgaataggattaggggagccaaacggcatgcctgttccaaccgtgtacaccgttccagtaatcatgccagtcatatagcataccggattgatggatatatacgccacataatacaagggagataagccataaggctaataatatccatcttgcttgcgtcggtaagggacgtaccttgaacaattggcagcaaatcgcgtatatcagggagaatatggggatgccgatgaataagatcgtccctatgcatcccatgattgccattgacagcggtgctccgtttatcaagtccgctccgaacggagagagattatagatgaatccggctccacccatgagcaaagcgaatgttacgactaccagaatgaatacgactagtactagcggcggcaacaagaagattccggctaatatgatgaaaaacttcaagatgaacccgatgaccagaacgaaaacatccgccagcttttggaagaagttcctcggcttatccgagctgatgaagtcgttcacgttattgctgactttctcgaatccatctgtcacggtctttccgatattctccaccgtcacgctttgcccgcgcatctcgagtttctcggtcgccgtgcgtgccatcggtactatgatccacaacaagaagtaaagcggaaccgtgattccatagaagaacatcagaaggaaaagcacgatacgtacggcagtcgggtcccaatccatgtaggcggcgaaacctccggcgacacctcccagaatacggttgtccgggtcacgcatcaagcgtttcttggtcgtctgggcatgagtctcctgttgttgcgtccggtaattatcctcgtggtcggtgcttttctcttcctcctcgaaaatctcttccggcttacccatccgtttgatcacttcctctacctgctcgatcgtgatgacttcgtagcctaagcggatacgctcgttaagaagctccgagatacgcatctcgaaatcatccatgatctcatccgaaccttcttctttgcggaagtggatacgcaggttcgacagatatttgtctaataattggtatgcgtcttcgtcaatgtggaaaactgtgcctcccagattaacagtaagtgtcttcttcatcactctttcgttttaattgtttctgatgtggtttattgtattatttagttcctgccatgaggtctccagctcgccgaggaatagttctcctttctcggtcagttggtaatacttgcgtggcggtccttgcgtagattctatccactgataacttaatagctcgctattctttaatcgggttaaaagaggatataaagtgccttccacaacgatcaatttcgcttcttgtaacttctgaatgatatcagaggtgtaagcgggttcttttttgagaagcaggaggatgcaatattccagcgtccctttcctcatttgtgattttacgttctctgcattcatctcttttaattttatgctacaaatgtatgtattacatatgtactatgcaatacatgctactatgaattattattatttaaccgaatacttgcacaaaaagagcaattatgtgtaaaaaaaggactgatgtcgtgtcttttagaagagaaaagcgtactttcgcggtatcaattcaaaataaggaattatgatttattatcatttcgccgagttaatacaccgtcaggcagagaaatatgggaaccgtacagcgttgaaacatagagataacgctacggggaaatggttgaagatttcttggagggagttttccgataaggttatgcttacggccaaggcgatggctgagttcgggataaaggtacaagagaatatcggagtttattcccagaatatgcctcagtgtttatatacggacttcggagcgtatggtaaccgggtggtttccatcccgatgtacgcgacgaattctccgggacaaatcgagtacatcatcaatgacgctaagatccgcacgttgttcgtgggtgagcaattgcagtataataacgctttcaaggtacagaaggactctaagtatctggagcgtctggttgtctttgatccggcggtcaagatgaatccggaagataagacgtccatttattttgatgatttcttgcgcttgggggataacgcgcatgcggagagcacggtgaaaatacgtatgacggaagccgttccggaggatctggctaccattatatatacgtccggtacgacaggtgagtcgaaaggcgtaatgcttcctcattcttgctatctggaggcgatgcggatacatgatgtccgtctgcctctggtaaccgacaaggatctatccatgagtttcttgccaatgactcatatcttcgagaaggcttggtgctattattgtctccataaaggggttacgatcgctatcaaccaagacccgaaaatgatccagaagacattgccggaggttcatcctaccttgatgtgcaatgtacctcgtttctgggagaaggtgtatgcgggcgtacacgagaagatcaactccgcctctccggccatgaagaagattttcttggatgctatcgagaccgggcgaaagtataatctggagtataagaataaaggtattccggccccgtgtggtttgaagttgaagtttcaattttacaataaaacggttttcaccttattgaaaagggtattgggtattgagcgtggacggtttttcccggtggcgggcgctccgttatcggatacggttaatgagttcttgcagtccgtgaatatcccgatcgcttatggttatggactgagcgagacgacggctacggtttgtttctacccggagatcggattccagtttggttctattggtgaggtaatgccgggagttcaagtgaaaatagatccggggaataacgagatcttggtgaaaggcaagaccgtgatgtccggatattataataaaccggaagagacgaagagggctttcaccgaagatggtttcttccgtaccggcgacgctggtcgtttggagggtaatacgttattctttacggaacgaatcaaggatttgtataagacttcaaacggaaaatatatcgccccgcaagcgatcgagatggtgatgagcggtgataattatatcgagcaaatcgctgttatcggcgatcaacgtaagttcgtgagcgccttgatcgtgccggcttatccattgttggagaagtatgccggggaaaaaggcatctcgttcgagagccgggaggagttggtgaagaacaaggatatcattcgtttcatcgaggctagggtagaggagcaccagaagaacttggcttcttacgagaagatcaagcgctttaccttgttgccggaacccttcatgatgggatgcgagctgacggatacgctaaagttgcgccgtccggtcgtattgcagaagtacgcaaccgagatagaggcgatgtacgaggaataacgagtttgtcggctatcaactatttcttatcttcgcggtaaatttaaaaaagaaaagaacatatgatcacatcagaccaactacatgacgtgttggagcgcgataaggcgctgagggggtatctttgacatcgatagcaagaccattcagttagaagaggaggagctacgtacgcaagaccccggtttctgggaagacgccaaacgcgcggaagtccagatgaagaaagtaaaggagctaaagaaatggatcgagctttacggtgaggtacatgcggcggctgaggagctagagttggcttacgaatatgtaaaggaagagattatcaccgaggaagaggtggacgcggcttataagaaggcccttcatttactggaagacttggagttccgcaatatgcttcgcgacgaggctgatcaaatgagctgcgtgctcaagatcaactcgggtgccggtggtaccgagagccaagattgggcttccatgttgatgcgtatgtatcagcgttgggctgagaataacggttataagatctctatcgccaactatcaggaaggggatgaggccggtatcaagaccgtgaccttcaatattgagggcgattatgcctatggctatctaaagagcgagaatggcgtgcatcgtttggtacgtgtatctccttacaatgcccaaggtaaacgaatgacctctttcgcctccgtattcgtcaccccgttggtggatgatacgatcgaggtaaaggtagaggcggcggctatctcttgggatacgttccgttcgggcggcgccggaggacagaatgtgaacaaggtggaatccggagttcgcttgcgttatcagttcaaggacccgtatacaggcgaggaagaagagatcttgatcgagaataccgagactcgcgaccaacccaagaaccgtgagaacgctatgcgtcaattgcgttccatcctttacgataaggagttgcagcatcgcatggccgagcaggccaaggtggaggccggaaagaagaagatcgagtggggttcgcagatccgtagttacgtattcgatgaccgtcgcgtaaaagaccatcgtacgaactaccagacttccgacgtgaacggtgtgatggatggaaagatcgacgatttcatcaaagcatacttgatggagttcgccggagaagaaagtgcggaaaaataagtttttccctttaacatttgcatatctcgataataaatcgtaatattgcacccgatttcagagcctagctctgaacaggtcctatagctcagttggttagagcacctgactcataatcagggagtccttggttcaagcccaagtgggaccacgatggatgatcgctaaataacgtaatattagttatttagcgattttttattgtacctgcatgaactaaaaaagaatatgagtgtttgaggtcacaatttgtgatctctttagagaaacgccgccgccctcgtgaatatggaatgaaaggcttggttgatcaggcccggatcgatacgggagtgtgtcgggaaggggatttgatgggagtaagcgaacgggaaatccagctcttccaatatcttgccggacgcttttcctaaagccttgatcaccccgccagtaggcataacgatatcttttttcaatgagatcgcccgaatacgatcgcaagcccgttggaagaacgactcccggtaatctcgtaacacatcctcacgtaccatggccttaaaggcttgctccagaaaatcattcttgaacgaggtgggaagcgtacggttctccaagaaatcatgccggaagtaatggcgtaccttggcgaacgcctccttgtccatgatatcacgggcgttgccatccatctcactgaagatagagccaccgcaaaacatgaataaacgggtgtccgtaaacatcttgtccggattcgctaataacaagacctgcgagagtaacgccccgatggaataagcgaataagttgatggacgtatcttccttgaacaaaggatgctcgccgttcttgatctcatgaaccaattgccacatattataaacggattctctgcccgaggcgtaaaagcgtaacgggttttgggatagccggctgctgagggccacgttggcgaaggtggagttcgtcacgttcgctacctcctccttgcgtttgcttacccaagggaggatcgcacggggattggcccataatcccggggtacggttcatatggaaagcgatcgggaacaggatgaccggcttaccggtcgtatgggtgaggtattccgcccatgtgaggtatttttcccaagtccgctcgttcaggccatgcaacaggataatcgcctcattattctttttacgtcccgagggcgtgaatatggcatacgagaaagatttgttctcttggatacgatcgtctgtcatcggacagaatccggtgggggtaagtcccttctggaactcgtcgatctcgctggctccacgggtctgggtgaagcgaaacgggatgatctccagatggctctcttccaattcagtctttttgtcataagagaaaagactgttcagttgcttagtacgaagtgaaatatccataatcctctgattttttactgcaaacaaacaatagaaaaacatctcttcaaaataaatggtttaaacgggcttggttggggacataaagtgttatttaggggtgaaatcttttatagaggggtgaatttcgtctgggaaaatgattacatttgttccaaaatagaggcaaaaagatgggaatgtgggatcaaaaaataccaagttacatatacggtaagcagaatatcgtgaggctgattctgtggacggctttgtttgcgttggtgtttatcaacatctacaagccgtttagctccacctcttggtacaaggtctcggagtttaagttcttcgtattctccagcttgattatcttgacgggagtattggtggttgtcttgagccgtattattctgttccatttggggaagcggcatgctatcacggtccggacctatgtgatctggatcgtgctggagatattcttcatgtcgcttttctatacgatttatacgttggtactgaatccggaacgagaatatatggaagtttttaacgattcggcggtgaataccagtctggttttattgctcccttattccgtgctgcacctgtatttctcttataaagagaaagagcggcaattgcgattgttggaggagaaccagacagaagcggcggttcggcaaagcgttttctctttctatgacgagaagaacgagttgcgcctttccgtgaagcgaagtaacctgctgtatcttgaatcggcggataattacgtttgtatctggtatctgaataaggggcagctcacgaagtttatgcttcgcaactccttgaaggcgatcgaagagagcctcgctgatacgaatgtactccgttgccatcgttctttcatggtaaatttcgaccaagtgaaggtgatccgcagggagaaggagggcgtttatctggagctggggatcgagaaagtacccgatatcccgatctccaagacgtatagcgagaaggtaacccgctggttccagacctattcttcctagcgggctatttcaattcgatattattttcttttgcgtattgcgaggggctcatgttgaattgcttggagaaggcccggctgaaataggattgcgagttgaaaccaaccgcctcggcgatctcgtaaatcctcatatcgccttgaaggattaactcggcggctttctttagccggctgatcttgatcaactcgttgggcgttacgttcgacaggccgttgattttacggtaaagggtcggacggcttagattcatcaagtccgctatcatgtccacgtctaggttcacgtcgtttatatggctgtcgatgatatcgttcagtttcttcaagaacttctcgtccgccttcgtgtaagccatggatttgatattggcaatcggcgagttgaaataataggcacgcatattgctccggttgttcagcaggttcgtcacttgggtaagcaatagatccatggagaaaggtttgtcgatgtaagcgtccgccccaagctcaagcccttccatgcgagattgtaaggtgttcttagccgtcaggaggatgatcgggatatggctgaactccagattagtctttatctttttcaataaggtgaaaccatccatgacaggcatcatgatatcgctgatgattaattggatgccatattcctgaagacgggcaatcgcctcctcgccattaccggcggtgacaacattgtaatggacattgatctcttgaccgatgaaatggagcatttcggtgttatcttccaccacgagaaccgtcgggcgggattcttgggtgacatatttccgctcgctggcagggttggtcaggacctctgctttctcttcctctagttttaatgagttcggttggttcaccggcaaacgtaatctaaagatgataagcccggccggagattcctccaacgtcaacgatccctcgtgcatctccgctaaagaacgggccaagggtagtccgagcccggtcccggatttatggatagaggagtcatcccggtagaaaggctcgaagatcttttcttttatctcctccgagatgggctttccatcgttcatgatatcgatcgtgaatcgctcgccatcttgtgcctcgaaccggacgatgatcttgcttcttgcgtatttaatagcgttcgataggaggttgctgagtatcttcgtgcaagcctccttatcgataaaggcgtagaaagatttcacgttacactcgataatcatctgcaatgcctcctgctctgccgtgtcgtggaaacgctcaaaggtctcttgcatcaatgcgatgatgtccgtatgtatgaagtttagtttatatccctcgatttccgtcttcctgaaatccagtagttgattcaccagatccagtagccggtttgcgtttttatccacaattgtcagataattctttgcgctgggagatagcttgatgtcccgtgttactttctccagaggacttttaattaaagtcaggggcgtacgtatctcatgagcgatattgatgaagaaatcaatcttggcttgataaagctccttctccttttcattctcgaactcctgtattttctgctgtatattggccttattatgccgggaaatgataaagatcagcaacactacgcatccgatagcgataatcccatataggattaacgccttggtagagagccaccatgggggaaggatcgtaatctggaacatcgccggctcatcattccaaataccggacaggttcgccgccttcaccttgaacgtataattaccgggcggtagtttcgtgaaataaacccggttctcgcccaccaaatgataccatttggaacttaacccttccatgcaataggcgtattgggtgaggttgggggcttggtagcttaatgatgtgtagtcgatgtagaatgtggactgattatgttctaaggtgatcccttttttaaaagtgatgtctttttgcctcaatagattatggtcggggtccgaataattgatttgtgtcatataaatcttcggttggatagagaactgttggatattatcggggtggaaccggaccaagcctttcaaggtcccgaaatataatttgccgtctttagcttttaaagaagagttatagttgaattgattggacaggagcccatgttcttttttgaacaccttgatctcttgattgacagggttaagtacggccaggccatttgtggtactgatccacatgtggcctttagggtcttcctcgatccggtaaatgacgttactgggtaggccgtcttgagtcgtgtattttgtcgtactctttaaattccggtcgtacattttcactccgtttccggtagcgaaccatagattgtttttagtatcctcatggatgtgattgatcgtccggttggcgttcgtgtttatggaatccaatttaaattcgccgtgtttttgccggattgggtcgaaataatataatccgatattgaatgttccggcccatataaccccttcgtgatcctcgaagatcgtttgtatcctgcaattaccggggaattgatcgagaggctcgaaaatatctttctccggattatattgatacatgccggatgccgtagctatgagcaagttatttttccgggttttatagagatatacgatgatatcgttttgggaggcgtaaggattcggggcgatcgtataatgcttgatgattttctccgtacggatatccatcacgtctaccccgttagcgtgtgtcccgatccatagatagtctccaatcacggtaagcccgtggatacagctttgggaaagaccgtctttatcttggaagttcttataggtttgcgtacggatgtcgagtttattgagaccagcgtcttcggttcctatccatatattatggttagcgtcttggcaaatatcatggataatatcaccgttaattgttttttgcccgggtatattgtagtctttcttgaatttgagataagggggaaggtaattaatgcccccattatccgtacagatccataagccaccttcccggtccttgcaaaactgtttgatagcgttattggatagtgaatatggatcgcatttgtcttgttctatgtgaaaggtcttgtttgaggggatttggtagatatagataccgttgtaggtggcgatccatacctcgtcgtttgtcacttggaaaatatcccgggtatagagggggctgttcttttgctgggtaagaacatttcggcaaacacctgtttgtatattgacttgtttgaccccgttatcgcttgtacctatcagtaatgtattatcggacggagatgcccatagagtcgtcatattatctatatgtagggtgtcgctaccgttatggatatttagagggatgaatttgttatcggtcgggtctaaaaggacgacattgccgtttagcgtggtggcccagatctgatcttggggggtgatatagaaagaggtgatcggatcactatccttatacaggtagttttggtgtagctcggattgctcattatatttaataagggaaaagccggataacagcatccacagattcccttggtgatcaaattccagataggtacagccgattcctttcgtgaactttatcaaggaaaaagtatcggtttggtaatcgtatttttgtactcccatattagtacccacccagagttcaccggaagggcttatcgccaagtcggtaatccagctacttattaaagttcctctctgcttggtttgattttttatgatatggaatttgttcccgtcaaatcgattgagcccgtcccgtgttccaaaccacataaagccataatgatcttggacacaacatgtcacgttattattgcttaatccatcttctacctcataggatttaaagtagtatgaccgggcgttgagctctattgcggttactacaaataataggacgtataaataattcatcaagttttttttcatagatctcccttgtatttcatgcgcaatataaagccttttcctagactttccatagcagtatcgtatcattgtttttcattttgtttcaatgtccagacttcggtttttggctttaaaagccgttccttgcaagactgtttgttgagacgataggtaataattttgagagaaaagtgcaatactgtttgactcaaggggctttaattttggcaaaaacagtgtgaatctttaaaagatagaatatgaatcaaaaagtaaaagtaggtataataggctttggtcgcatgggtggattttatttggaggagatgcggaagagcgatcaatgggaggtactttacatctgcgatacggacccagaggcacgagatttggcaaggagaaagtcgccgacatcccgaatcgtagcggatgagcaagttgtattcgaggacccggaagtacaagtggtcggtttatttacattggcggattcccggttgaggcaaattaagaaggcaatggcatttggcaagcatgtcatctcagagaaaccggtcgcagatacgatcgagcatgaatgggaggtcgtgaaatgcgtggaaaactcaagtttgttctcgaccgttaatttgtatttgcgtaattcttggtaccataatacgattaaagaatttatccggagaggagagatcggagatttggcgatcattcgcatttgccatatgactccggggttggctccgggtgaaggtcatgaatatgaaggtccgtcttttcatgattgcggaatgcattatgtggacatttcccggtggtatgccggatgcgagtataagacatggcatgcgcaggcgatccggatgtgggattatcccgaaccttggtggttgcaatgtcacgggacatttgagaacggggtggtatttgatataacacaagggcatgtgtatggacaattatcgaaagaccaaacgcataactcttacatagatgtaataggaacgaaaggaatcgcccggatgagtcatgattttaagactgcggtcgtggagttgagaggtgttaatgaaacacaccggatcgagaagccctatggagggaaaaatataagtacgctatgtgatttgtttgcggattccgtacggaccggtgtttttaattcccgcctaccactgatgcgtgattccgctatcgcttccgagtatgcgtggaaatttttggataacgctagacgaaatgagatgccttctatcgggaatctacaaaccttggaggaaatccgggagagaagacggaatatgacggaagggtatggcttgcttcgccatgtaaaattgtctcattcttgatacgattttctcaatgaccgggggaaacaggctggaacttgtattatgcgacaatcggaaacgattttgataaaatagaaaaagaggaattttcgtatgcgtgatacatttgcggcagcttgttcatagagcgaaaatagaaacattaatttaatactatgtagcatgaaaaaaatgattgttcttatcagtcttttatgtggagcgttttttatgagcgcccaacaaagtaatcaacaacaaagaccaccggaaagatggaaacctgagagtactgaatggtattatccggttcctcctaaggtaaagccgggtgtaggaactggtgctccttccgatgcgatcatcctgtttgatggaaaagatctttctatgtgggaatctgcgggaaaagatggaggtcccgctaaatggaccgtaaaggatggggcgatgattgtggcttccgggaccggatcgatccggacaaaagattattttggagattgccagttacatatcgagttcaagacccctacaccgggaaaggataatacattacagatgaaaggtaatagtggcattatgttacaaagccgttatgaggtgcaggttttggattgtgaggataatcctacgtatgtgaatggctgggtcggcagtatttataagcaaagcgcaccgttggtaaatgctttcacgaagacaaatgagtggcaggtttatgatatttattggaaagctccccgtttcgggacaaacgatgaattggaatctcccgctatgattaccgtggtattgaacggtatcgtagtacagaataattatgtactgaaaggaacgaccccatataccggtttacctaaatatgtagcgcatggccgtctgccattaagcttacaggatcatggagtggaagtggctttccgtaatatatggattcgtaatttataaattgtataaccttaaaataatgatttatgactacacgtaggaattttttaaagaactcgacgatgttggccgctggcttaggtatctcacctcttttggcatcggcagctcctaccgtctctcataaggaagagactataaatgggcgggtgaatatcgctgtaataggtgtcggtatgggatgccgtgatttgcaaggggctttgactgataatccgtgggtacattgtgtgggcatgtgcgacgtgaacaaagtgagacttgatgagcagatcgcacgtttcaaaaaagactttccgaaccaaacgacttcgatcaaggcatatagtgacttccgggaagtcttggcaaataaggatatcgacggggtcattatcgcaacaccggatcattggcatccttacatcttcgctgaggctttaaaagcgggcaaggcgatttatgtggaaaagccggttggtaattcgattccggagtgccattcgatgatggatttccaaaagaaatataaaggggtggtaacaactggcttatggcagactagtcaacgatatttcttggcggctaatgagatattgaaatccggtgtgttgggggatgtttataaagttcagctatggctttgccaatcgacggacccacgtccggccgtagcggattctccggttccttctacattagattacaatatgtggttgggcccggctcccgagcgtccatttaataattaccgttttcgtggatggcgtggcttttgggattatggaggcggtcagcaaaccgactggggagtgcattggatagactctgcgttcgatggattgaaagcgttaggattgtgtgaccgtgaatatccggaggcggtattctctacggcttataaagatcctacctcttttaatgagactcccagttgccagacaacgatctttcagtataagaatttccatatagaatgggcccaacaagtcgctcatctctataatcgggatcaaggggtagcttgggtcggaagtaaagctaccttagtatgtaatcgtgaaggttatgaattgattccagagaagaatcgggagggtgagttactaaccgaccgtgcccagcttgtcgggaagttcgaggatggtggtattgaggcccatgcgacgaattggtgtaagtgtatattaaataaatctattgagacgaacagcccgatcgagaaaggggctttcgcgacgatcctagcccatatggctaatatctcatatttgacgggaactcgtgttgtgtatgatccgcaagctcgtaagtttgtgaataatccgaaagcggatgcgtatttgaagcggagctatagaagcccgtggcaattcccgaaagtttaatgcgattgaatgcttaaaaacaacgaccggtggattttaatactctattatatataaccattaccatacgaattgaattacagcacattgagatctccggtcgttttttgtaaaaacaatgtcaactttaaatgaatgagttatggaaaatcaaaaaaaggaagtatggcttcgaaaggccctgtttttgatcgttagtttggcgttattctttcccatgatggcgcaaacgattacagtaaaaggagttgtaaaggaatctatgacaggcgaaccgatcattggcgccaatgtagcggtgaaaggaacgactaacggtacgatttctgatataagcggtatgtatcagatctcgaatgtatcatcaaatgccgtattgatcgtttcttatattggatataagaccgcggagattccggtaaatggcaagaacacgataaatgtgagcttggaggaagaaagtatcggacttcaagaagtggtagccgtgggatatggctctcagaaaaagaaagaattgaccggctctgttgcaggcttgaaggagggagacttgattaagggcgtacagtctgacccaatgggtatgttgcaaggtaaagtggcaggtttgaatatatccaaaccaaatgccggcgacccgaatggagagtataagttccaattacgtggaacttcatccttaaccggtaatacttctccgttgatcgtcattgatggtattcctcaaggggatttatccgctattccacaagatgatattgaaagtatcgatgtattgaaggatggttcagcggcggcgatatatggaacccgtggaacgaatggcgttatcttggttacgacaaaacgaggttctgccgggaagatgagcgttacctacaatggatatatgtctatctcttccatagccaatcaattggaagtcatggatcgtgaccagtttttggcaaatgggggaaacgaccggggatatgatacgaattggatggatgagattacccgaactccgttctcccattcgcataacttggcattgacaggaggtacgaccgattttaattaccgggcttctgtatcttatcgaaataatcaaggtatcgctcttaagtcagggttcaatgagatgatcgctcgtttttccgctaatcagaatttattcgataaaaagattcaaatagcatacgacgctacttatcgtcgttttgaccgggaaggtgagaattccagctatgatgattattccgcttttaagcatgcgtattattataatcctacggcacccgtatacgacgagacgggaacgatagatgccggcgggtattatgcgctggatattcaaggatattcaaatccggtggcttatattatgcagcgtgaccgtcgtacaaaaggcggacttttccaagggtctgctcgtgtaacttggaacattttggaaggacttcgtgcgcaagcttttggctcattgaaatactctgatataaataagggtacttatacctcacgagaggtatttaacacttctagtttcgggtcagcgtctcggagttttaatactcgttttaataaaacactggagacgacgatcgactatgtaaaatcttttggagaacaccatttggtggtattaggtgggtatacctatgagcataactattgggaatcatttggtatgaataactcgaattttgattcggatgtatattcttactataatttgggtgcgggtagtaacttgattaataatcctagccaaagcatgatggatggttcggtttcccaagataatttggtttcgttcttcggccgtgtaaattataactggggaaatcgttacttgttatcagcgtctgtacgacgtgagggttctactcgtttaggtgcggattataaatggggaactttccctgcggtaagtgtcggttggtctatcggtaatgaggcttttatggaaagcgctagctggattaacgatttgaaattgcgcttgggatatggcgtgacaggaaatatgccttcagataattatttgtctttgtcaatgatgggagtggtaggccgtttttatgatcatacttctaaacaatggatcaatgcttatgggccgacacagaaccagaatccggatttgaaatgggagcggaaaggcgaatggaatctaggtgttgattttgcagcgttgaataacagcttgaacgtgaccgttgatttgtatacccgtaaggtttcagatttgttgtataaatataaggttccgactcctccttatcaatattcttctatgttggcgaatgttggcgacgctacaagtaaaggtctggaattctctgtttccggaaccccggtgcagaataagaacttctcatggactagttctattaacttctcatttaacacgaataaattggacaaattaagtaatgagactttccagactgactggattgagaccggttatttgtcggatggtgatttaggaggtatgaactcgactccattgattcgtttggtcccgggtggcaaggtcggtgatttttatttgccggtattcgagggatttacggaagatggtaaatggaaattcaaggatgtcgatggtagtggtgactttacatataatgaggatcgtgagatcgtaggtaatgcgcaacctgattttattgcaggatggactaacgagtttaaatatcgtgacttcgatttatcgtttacattccgtgctgtcgtaggcaatgatgtatataatgtaagccgtatggcattggagaatcggaatgtggctggaaaggagaagaatatgttggcttcggtaatggatatccctttgcaagatgcggctcaagcctctagttattatttggaggatggttcttttgtgaagttggacaatatcacattgggttataatgtgccggtgaagaaattaggtttcatgcaaaacttacgtttgtacttgactggtcagaacttgtttacgatcacaggctataagggtatcgacccggaggttgatatggtaggattagataatatgggtattgagaggactcgttattatccggctagtcgttcttttattcttggtttgaatgttacgttttaatggatactctaaatatcgaaggttatgaaaaaatatagtttaatatatatagtgtcaatgatttgtttcttggttatcgctccttcttgtacggatatggatgaagatacgacgggacaaatggtctcaaatgacttttatgcggatccttctttgattccgcaagcggtaggtgctgcctatgcggaattgcaggcttatcagaatcactggggagtatgggggttgcagactgtttcctcggatgaatgtgttgttccgactcgtgcgccgggtaatgactggtatgacggaggggtatggcaggatttccatcgtcatcaatggcaatacaatctggatgcattgaataatgtgtggatttccgtattttctggaataacgacatgtaaccgtgtggtttacgacttggatacatataaagaggagatggatgtcgatatctataataaatatcgtgcggagactgttatcttgagatgtttctattattctatcttactggatttattcgggaacgttccttatatcgacacgtatgagagtgaaatcacggcttctcctcagacaagccgtcctgagctttatcagaaagtcgtagattgtatcttagataatatggaatatttggatgacgctccgtctgccgagaattatggaagatgtacgaaatcgatggcttatacgatgttggcaaaactatatttgaacgctaaggtgttcaaaggggcctcttcttatgataaggacgatatgaataaagtgatagagtattgcgataaagtgattaactccggatattatgaggtcgtatctgatttctccgctccatttaaagtggcgaatgagtcttgtaaagaaaatattttcgtggtaccgatgcaaaatggtatcaattcaaatggagactacgagtttcatttccataaattctccggacatcccaagtctcgccagatgtggggtataaatgtgggcggttggaatggaggttgcgctactccggacttccttgctttatataaagatgacgatacccggaaaaaggcgacttttatttacggtttgatttatgataaggtcacgggcgagcctgttgaggatggtgataatccgggaaaacaattggaattgactattgaggtatcttctattaatgccgcttatcgttgggaaggcgctcgtattcagaagtatgaatatgagttgggtatgactggtaatatgaacaatgattttgttttatatcgtttagctgatatctattatatgaaggctgaagctattttgagaggtggtaatgccgctactttatcagctttgtgtgcggaacctgcattccagttaatacgtgaaagggcaaatcagcctgtgtatactccggaaacattaacgttggatgagttgatcaatgaacgtggccgtgaatttgcttgggaaggttggcgtcgtcaagacttggttcgttgggataagttcgctaaaggtagctggacatttaaggaagccttgaataataattcgcgtgatttattcccgataccatacgatcagattacgaaaaaccaatcttggaaacagaatccgggatattaatagttgtgtttttatgcatatggatagacgacaattcgtgaaaaacctaggactgggcacagcctctttaagcatgggaagcttggtaacggcttcctcatgtgccccgtccggggattcctcccttaaacaaaacgtcaaggaaggagaggatggacagtttttatttatcggtgacgatatcgccatcgcccagacagagtatgggaaggtgcagggatatctgctgaatcatgtatatacgttcttgggagttccttatggggctgatacgtcgggaaaaaatcgctttatgcctccccaaaaaccagagccgtggacagatgtgagacctgcggttttttatgggaatacggcgccgcaacgtatggagaaccggtggcccaataattacggaacttttgccgatcattggaactactgggatgtgagtgaggattgcttatatttaaatgtatggacaccgggcattgcggatggtaagaaacgtcccgtattggtgtggctgcatggcggcggttttacaaatggtagtgggatcgagcaggatggatatcatggagagaatataagccgggaaggagatatcgtattctgttccattaatcatcggttggggccgattggcttctctgacttatctggtgttggtggagaagcgtataaggattccggaaacgtggggatgttagatattattgccgccttgcgatgggttcatgataatatcgccaatttcggtggagatcccgggaacgtaacggttatgggacaatccggaggaggttctaaggtctgtacagtagccgctatgccggcggcaaaaggtttgatccatagagccgtggctttaagtggatctacggtaggagcttccgatcaggtgatgacccggaaggtgggagaatatattttgagagaagcggggctgaccgcttcccaactggataaattgcaaagaataccttggcgggaatatttggatatagcggatagggcttgtaaaaagtgctgggaagatcaagggattagcatgagacggacttttggccctgttgctgatgaccggaatattccggccggtgtattctactccggtgagagccatttggagtctcctgtcgtcccgatgatattctgtacgactttccatgaatggaacccgaacagggtggatgcggccttggaaaaaatcactcaagacggtgtgatcgagaaactgagaagtcaatatggtgataaagcggaatcgatcgtgaaggctttcgccaagaatttcccggataagactccgatggagctttgggcgatgattttgtcttcccgtcaacgagtggttgaggcggctaacgcaaaattaaagcaaggccagcctgtgtatgtagcttggtttggctggtgtccgcccttgtttaataaccgtatgcgtgcgttccattgctcggatatctgtttctggtttaaaaatacggatcggatgtttacccatacgggtggaggtaaggtacctcgtgcgttgtcagataagatgtctggcgctttgttgaatttcatgcggacaggagatccgaacggaggagagttacccgcttggccgaaatacacggaagaaaatggagaggtgatgatcttgaataatacgtgtgaggctcggaatgatccggaccgggaggcccgtaaatctttggaggtttaatttaaaacgagagtgttatgcttgagaaaaagatttcaagacgtaatatgcttcggactaccggtttggcggttttgggcagtacgttcgcaggcttggcttcttgcgctccgaagaaaaaagaggagccatcacccgaagcatcctcttcgaaacgtcctttccgtgtctgtctcaatgtctctacgatagcgggttataaacttcctgttcaaaaacagattgatttatgtgccgaggctggttttgagggaattgagttatggacccgtgatgtggatgcgttcgtaaagcaagggggaacttatgagacactcaggcgtcagctggaaggctccggacttttattggagaatatgatcggttttgcctcgtggtttgccgatgatccttcgaaacggaaggaagggctaaaccaaatgcggcatgatatggagatggtagcgggattgggcggtaaatttatcgccgctcctgctcaaggagttactcaattggatcgtacacggttgccggagtattccgaacgctatcgggcgatactggatttaggggatgagatgggtgtcactccgatattggaactatggggggccggggttctgaatcaattatcggataccatggcgatagcgatcgcctccgggcatttgcgggcttccgtcttattggatttctaccatttgtacagaggaggaaatagttttgatagtttacgcttgataaatgggaagatccttccggtttttcatatcaacgattatccggagttgcctcctcgtacggagttgagagattcggatcgggtgtttccgggagatggtatttgcccgtttaataaagtacttcctttgctatacgactccggtttccggggtgggttatccgtagagctttttaataagggatattgggaaaccatggatgtaaaggaggtcttaaggaagagttttgagaaaaccacacaggtaatcaatagttcgatgggataaaagtttgttgggatttaggaaagggactgcctcgaggtgttttaccttcgaggcggtcccttctgtttttatagtatcttctcttaaaaatcaattattttataatccgctgtgatataaaaagtagtatatttgcgtacatccaaaataaacagttgttttgcggagggttataggggttgttatcatcggaaaagccggtaataaaagatatacattataatgaacttacttcagagatatgtgagtcatggtatagctataggtttgttagtatttataatgctagcgtttaatttgtctgtgttagcgcagacaagtgaaaaacgtgtacttagggttgcctttccgcaggtagatggcatgagttggacggccgaagatggtactcatcatggtatgctcgtagactatctcaatgagatcgccaaatataccggttgggaatacgagtacatagatacgaagggaccggctatgttgaatgaatttgttgagggtaagtacgagttgatgggtggaaactattatatacccgctttagagaaatattatgcttatccgaactataatatgggatatagccgttcattattacttgcccgatctgatgatcgctctatccatagttatgatttggagagtatgaatggtaaaaccatcggtgtgtatgagaatgcaagggagaacattcgccgtctcaaagagtttatggctatcaacggattgtattgtaatatccgatattacaaacaggaagatatggtggggaaaatcgggttatatccctatctggctaaaggtgagatcgatttgttactaaataatgttgcccatattagcgattctgtccgtgtagtcgtggcatatgactctcagccttattatatcgtgaccaatccgggtaataaagaagtcttggatggtttgaatatggctttggaacggatattggatgccaatcctaattttgcggcggaacgttatgccgttaatttcccagaccggctcgtaaacatccaactgagcgaccgggatctggagtatgtcaatgagaggaaaacgatcacggtagccgtacctgagaattggtatcctttgtattgtaaagaaacgccgctgaagaaccatacgggtatcatggcggatgtactggatgagattaaaagtttcacagggctacgattctcgtatgtatatgcgaaaaattatgctgatgcgatccgtttgatacagcaaggggatgccgatatcttaggttttttcttgggagatgagaacgatgcggcccagctagggcttgcgctttcagcctcttatgtgagtgcgaacaatatcatagtacgcaataaagcctgtagttatcccgctccgggtttggttggtgctttggtggaaagtcagcgatttccaagtggcatatctgcggagaagattcggtcctatccgggcattaaggaggcattagccgctgtcaatagcggagaggctgattttatctatggattgtcctctaaaatggaacaggatatttcgcgttatcatttcaccaatcttgctcctgtgacattggtcaatgatcagagtgcgataagttttgcgttacctaccccggttgacccggatttattaaccgtactcaacaaggcgatcaataatctttctgagtccgagaggactgttatacgcaatcggaatctggaatctatcggcgtgaatgaattctctcttacggactttatatatgcgaatcccttacaatttatgtttatcgtgatgtttgtcctgtcggtgctatttacggcattactgctggctataggggcccggatgaaagcgaccgtgatacagggcaacctgaaacgggctgaggcggctaacttggcgaagagcgagtttctttcccggatgagtcatgagatccgtacgccgatgaacggaattgtaggtatgagtactatcgctatgcaaaacatagataataccgataagataaaggattgtcttgagaaagtaatcatgtcttccaagcatcttctcgctctcattaacgacgtgctggatatgtcgaagatagaaagcggaaaagtggaacttcgacatgagagctttaatttccgggcattcttgcaggactttgaaaatctgtatggcgagcaggccaagagtaaagggatcagctatgagacgatattggctagtgatctggaagtacagattataggagactccttgcgcttgaatcaagttctctccaacctgttatcgaatgcgctgaaatttacgccggccaagggaatgattaaacttcgggtatctaaaacaggtgaggatcaagagaatgtttaccttcgtttcgaggtaatcgatacgggatgtggtatagccgaggagaactatgataaaatcttcgaatcgttcgaacaggaaaatgtggatgttacttataaatatggaggtacaggattagggctttctatcgttaagcgtttcacagggttgatgggtggtggcatacatgtgacgagcgtgcaggggagtggcagtacattcaccgttgatctgcctttcggcaaaataaaggaatcgggtaaacccactcgtttttccgatattaatgggaggaatgaccttgcgaaggattgttatgctgttgattatgacttcaaaggtaaacggatcttattggttgaggacaatgagcttaaccgggagatagcggaggaattgatcggagttaccggtgcgtcggtggagagcgctgaggacggggtacaggccgtagagatgtttaaggaatctgccgaaggatattatgatttgatattgatggatgtgcagatgcctcatatggatggctatgaggctacccgatgtatccgggcattagggcgttctgatgctcaaaaggttcctatcttcgctatgacagccaacgccttcgctgaggatgtgcagaaaagtagggaagccggtatgaatgctcatatatctaagccgttggatatacgtgccgtgtataaacaaatgaaccgataccttcaaggataaataaaggatcgatgaataaataaaaagggaccgcctcgggaaattaggttttcgaggcggtcccttctgcttttattagatattctttatttttccgtaattaccgagaattcaccgatacccgcttgctttttattatctacgatacgggttgcgaccaaacggatttggttacctttcgttattgggaaatgtacgacttgctcgatcgggttagccttgatattggagaattcgccttcggccaccttctttccattaatatataattgatagttggagatatgaccgcttgcgtcacgtccttggttcggggtgtagcggaatccggatataggcatttctttcgctaattgtacgactaactcttgtttcccttgtggcaaatagtaggtcgtgtagccgtttccgtctaggatcaggctggttttctcatctttcggtgatacgatcgtgtaatcacaagctggaatatcgaacgtttgcgcggaaaccggactgactgtatcgaaagtcggatcataggcaatcgccttgacagttcctttttgagcgaaagcgaatggcgcctgataaagcggtgagtccttggtcggatctgagccgtcggtggtataatgaacctcggagcctttatccccggcctgtatggttacctcgtcattgatattacgggcaatcgttggctcggtcaccaaggcgggggcaaggtatgcctccacgttattgatacaaagcggtccgcgggcatccgtgaagttgatgcgtatcttctccgctttctcggtctggaaacggacaattcgtttatagccgacagttgtcgtagaatccacggtctgtgccggaatccatttaccctcttgctcgagttcgatattgaacgagcgtactcgttgtcctaatgggatatattcttgtatgaccaagcggtttacatcggtaggatgggttaacgtgaaagtcaatgaaccactggttacgccatcgtccgtagcccaataggtatcccaatccccatctactgccttattgggactaaaattacgtcctcttttattgctcgcttgtacgtaacatcctttcaaaagattctccttaaagtcattttggatggtttgataccattgtacggcacgggcggagtctaccggacttatttttccgttcaacgctacggggaagttcaataggaaattggcgttatgcccgacgcttcggtaataaagatcgactaattttgccagcgacttgacttggtgatcttcccgggagtgatagaaccatcccggacggatagatacatcgcattctccacctagccacatcggtccgttctcatctccccatacactctgttggaaagtaggcatggagggttccggggcgaagatgctccattgggtatcaccggcccaaccttcctcgttaccgatccagcggatatcgggtactgtccctccgaaaaccatgatgtccgggtggtgcgccttgatcgtgtcgcgtgcccgctcatattgataataggtcttggcgtctatagcacgggtttcatttgtgccgccataccagccattgccaccgtttgccccatcaaaccagtattcgaacaacgggccatagttggagactaattcatgtaattgggcatggaatttctctacatatcccggttgtccgtagttctcactgtttctgtcccaaggggagagatagacaccgaatttcagcccgtgtttcttacaagcgtcggatagttcttttaccatatcccctttgccatctttccaaggagaattctttacgctatattcggttgtggcggtaggccatagacagaaaccgtcgtgatgcttggtggttaagattacgcctttcaatccggcggctttgattgtttgcgcccattgatcgcaatccagatccgttggattgaatgtggaggcgggagtgtttccgtaaccccattccagatcattgaacgtatttaatccgaaatggacaaaggcatatgtttccatcttatgccattcaacttgtgccggcgtgggaacgggcaggataggggcgggcgctgtcgcttctttacaggagaagaaggaaaacaagccaagccccaataaaatagaggaactcaagtgcttcattatttgtttatatttagatgagacctcaaatatatgaaaaaaaacggcagatttttattctgtctttagatatctagataaaagataaagtctcctgtcttttagatgtctcctctggggaaattttcatgctagcatatatttgtttatcaattgtttgcagtgccagtttatttatcgcctttggcacggtcgtgccatcacagtggcaacgctgtgccatccgtgtggcagggccgtgccatcgtagtggcacagtattgccgctatgatggcaagggtaccggctatatcgtttacgtgagtagtcggtatttttgcgtgtgctatattataatgtacccgatatccgttgccgtaaaaaacttgaaaaataatgcccgataaatttggaccgtatgttttatagcattacttttgcacccgcattcgagagagaacggcgcttcagaaatgatggaaacgtggaggtatccttgggtaggggatgaggttggctaggccaagcgataatttccaaccgcccggagatcggcttgagaaaaaaaaacttgaaaatttttcaccgaaaaatttggaggttaagaaaaagtccttacctttgcagccgcaatcgagaaacgatagcgagagggttctttgagagatttacataattcaacaagtagtacaagtattaggaaaagaaattttccggatcgataccgtcaatagaagtatgactttggactacgataaacggattccggagcgaggatatgataaaacaatttaaacaacgaagagtttgatcctggctcaggatgaacgctagcgacaggcttaacacatgcaagtcgaggggcagcacaggtagcaataccgggtggcgaccggcgcacgggtgagtaacgcgtatgcaacttacctatcagagggggataacccggcgaaagtcggactaataccgcatgaagcaggggccccgcatggggatatttgctaaagattcatcgctgatagataggcatgcgttccattaggcagttggcggggtaacggcccaccaaaccgacgatggataggggttctgagaggaaggtcccccacattggtactgagacacggaccaaactcctacgggaggcagcagtgaggaatattggtcaatgggcgtaagcctgaaccagccaagtcgcgtgagggatgaaggttctatggatcgtaaacctcttttataagggaataaagtgtgggacgtgtcctattttgtatgtaccttatgaataaggatcggctaactccgtgccagcagccgcggtaatacggaggatccgagcgttatccggatttattgggtttaaagggtgcgtaggcggccttttaagtcagcggtgaaagtctgtggctcaaccatagaattgccgttgaaactggggggcttgagtatgtttgaggcaggcggaatgcgtggtgtagcggtgaaatgcatagatatcacgcagaaccccgattgcgaaggcagcctgccaagccattactgacgctgatgcacgaaagcgtggggatcaaacaggattagataccctggtagtccacgcagtaaacgatgatcactagctgtttgcgatacagtgtaagcggcacagcgaaagcgttaagtgatccacctggggagtacgccggcaacggtgaaactcaaaggaattgacgggggcccgcacaagcggaggaacatgtggtttaattcgatgatacgcgaggaaccttacccgggtttgaacgcattcggaccgaggtggaaacaccttttctagcaatagccgtttgcgaggtgctgcatggttgtcgtcagctcgtgccgtgaggtgtcggcttaagtgccataacgagcgcaacccttgccactagttactaacaggtgatgctgaggactctggtgggactgccagcgtaagctgcgaggaaggcggggatgacgtcaaatcagcacggcccttacatccggggcgacacacgtgttacaatggcgtggacaaagggaggccacctggcgacagggagcgaatccccaaaccacgtctcagttcggatcggagtctgcaacccgactccgtgaagctggattcgctagtaatcgcgcatcagccatggcgcggtgaatacgttcccgggccttgtacacaccgcccgtcaagccatgggagccgggggtacctgaagtccgtaaccgcgaggatcggcctagggtaaaactggtgactggggctaagtcgtaacaaggtagccgtaccggaaggtgcggctggaacacctcctttctggagcttcaggattccgtaccgaggtcatacgaggtattgatccccttgtgctgctgttgagattatgtttatatatagatcttacagaccgggaggccggtcaaaaagagagaaaatgacgctgggacgtaagtcttggcaaagttgacagtcctatagctcagttggttagagcgctacactgataatgtagaggtcggcagttcaactctgcctgggactactccgaatgagggggattagctcagctggctagagcatctgctttgcacgcagagggtcaacggttcgaatccgttattctccacacatcccgcgagggaaagaggatctttgacatgttggacatcaaaaagaagaaacaagtagagcgagcttaagatatatcaacccgtgcgtcaagtgcgaggtgagagaaagtaagcaagggcagacggtggatgccttggctctcggaggcgacgaaggacgtgataagctgcgaaaagcccgggggaggcgcaaatagcccttgatcccgggatatccgaatggggcaacccggcaggctgaaggcctgtcatcccgtaagggaggcgaacgtggggaactgaaacatctaagtacccataggaggagaaaataaacaatgattccgtaagtagtggcgagcgaacacggaagagcccaaacccatgtcgtctaggcgacacgggggttgtaggaccacgacgtggcaagatagagtcaagtggaacgccttggaaagggcgaccgtagagggtgatagtcccgtacacgactgacgattgaagcctagtggtatcctgagtagcgcggggcacgagaaatcttgcgtgaattagcggggcccatcccgtaaggctaaatactcccgagagaccgatagcgaaccagtaccgtgagggaaaggtgaaaagaaccccgagcaggggagtgaaatagaccctgaacccgtctgcctacaagcggtcggagcgtcgtaatgacgtgacggcgtgccttttgcataatgaacctacgagttaccttccccggcaaggttaagtacctaaggtacggagccgaagcgaaagcgagtctgaacagggcgccaagtcggggggggtagacgcgaaaccgagtgatctacccttggccaggttgaaggttgggtaacaccaactggaggaccggatgggtaagcgttgaaaagctttccaatgagctgagggtaggggtgaaaggctaatcaaactcggagatagctcgtactccccgaaatgcatttaggtgcagcctctttatagtatatcgtgaggtagagcgactgattggatgcgagggcttcaccgcctatcaagtccagataaactccgaatgcgcgatatatatttacagggagtgagggcgcgggtgctaaggtccgtgtccgagaggagaagaatccagaccaccggctaaggcccccaaatgatcgttaagttgaactaacgaggtcggatcgcagagacagctaggatgttggcttggaagcagccattcatttaaagagtgcgtaacagctcactagtcgagcgatctggcgtggataataatcgggcataaacgatctgccgaagccgtggatgtcgcaagacatggtaggggagcattccatgcggcgtcgaagatgagggatgacccttgttggagcgcatggaaaagcaaatgtaggtatgagtaacgataaggggggcgagaaacccccccgccgaaagaccaaggtttcctgatcaacgctaatcggatcagggtgagtcgggacctaaggcaaagccgaacggcgccgccgatggaagaatgggttaatattcccatactgcctcatggagtgacgtggagacggagaagtgacagtcctgccggctgacggaatagccggttgaagggtgtagatattgattcccgtaggcaaatccgcggggagagtcgaacctgagagtatacggagcgcttgcgcaacgtaatatggacgtaaccatgctcccgagaaaatccgctaaacttatccatgcggcacccgtaccgtaaacggacacacgtggtcgggttgagaatactgaggcgctcgagtgattcacggttaaggaactaggcaaattgaccctgtaacttcgggataaagggtcctcgtcgtaaggcgaggcgcagagaataggtccaggcaactgtttaacaaaaacacatggctgtgctaaatggaaacatgatgtatacagcctgacacctgcccggtgccggaaggttaagaggagatgtcatccgcgaggagaagcgttgaattgaagccccggtaaacggcggccgtaactataacggtcctaaggtagcgaaattccttgtcgggtaagttccgacctgcacgaatggtgtaatgatctggacactgtctcaaccgtgagctcggtgaaattgtagtatcggtgaagatgccgattacccgcgatgggacgaaaagaccccgtgaacctttactatagctttacattgagtttgggcagacgatgtgtaggataggccggaggcattgaagcaggtacgccagtatttgtggagccgacgttgaaatacggcccttcggttgtttgagttctaactcctagttaggaggacactgtatggtgggtagtttgactggggtggtcgcctccaaaagcgtaacggaggcttctaaaggtgccctcagaccgattggtaaccggtcgcagagtgtaatggcataagggcgcttgactgggagacatacaagtcgatcaggtaggaaactagagcatagtgatccggtggttccgcatggaagggccatcgctcaaaggataaaaggtactccggggataacaggctgatcattcccaagagctcatatcgacggaatggtttggcacctcgatgtcggctcgtcacatcctggggctggagaaggtcccaagggttgggctgttcgcccattaaagtggcacgcgagctgggttcagaacgtcgtgagacagttcggtctctatctatcgtgggcgcaggagatttgcgaggctctgacactagtacgagaggaccgtgtcggacgtaccactggtttaccggttgtcccgccaggggcaccgccgggtatctaagtacggatcggataagtgctgaaagcatctaagtacgaagccggcctcaagattagatctccctcaagggtggttatagacgatgaccttgataggccacaggtgtaagggcggcgacgtccgagccgagtggtactaatagcccgggactttcctcacagtgaaggttgatatattttaagacgataaggcgaagctggtctcttcggattgatgtccggtcaaaatcttgataatgatattaaggtggctatagcacgagggatccacctcttcccattccgaacagagaagttaagcctcgtcacgccgatggtactgcgtaacagtggaagagtaggtagccgccgtcttgagaaaggcgaaagccggaagagagaggagtcagtcgaaagattggctcctttttttggtatatacactagccgtttaattttcaatgatgtctgcctcttattgctagcttccatttacaacagtcatttagatgtaacatgacatgtctggtaggaggcattaataaaataccagctatatcttttttagcccagaaatcaagcaaccaaatcgaatcttcatgatttgtgataccaccttcttctaatatccggcttatcctttgagttgggattttgcgacgtatatcatcgggagataaggttcggatgatttctctgctttttcgtcctacttcattcctgtattctaagagttcttgaatacgtagacttttgcttagctgaataatctggttatcagataaggcatttcctgtgtctctgataggggaattcattcgggtttgccagtcttcattgaagatctgcttttccccgttaactaatatattcatggtcagatcctcaattctgctgatatgccataatacccaagcgatggtttcatctttcgctgtaggcataatggcatattcatcctctcttaaatctccgactagctcatcgacctcgtttctctcattaccagacaccacagagaggtgtaattttccatgaatctcaagaaagagctccttggtttgctctattaattccggtttacggataatgcggtttagttctttatgtgattcgcttaatccggctccaaagtatttcattttggggattattggtagcgtacggctgtcccggcggcggtaaccatcagcatgcttccgcttcctcctacggtctcataatctagatctacggcgattacagcgtttgcgcccattcgtgccgcatgatcgctcatttctttcaaggccgtttctttcgctttgcgtaagacactctcgtaagaacctgcacgtcctccgacaatatcccggatgcctgcgaagaaatctttgaatacattcgctccgatgatcgtttcaccggatacgattccgaagtactgggtaatttcttttccttcgatcgtgttagttgttgtgagtaacatagcttttcaatttaatcgtttgagggcaaatataagataaagggcgaaccagtgtactgattcgccctttgtttttatgtttctttatatgaatttattttaccggttgatcggtcatgataaactcaagcttacctccatttatgatatcggagtggctgatgaaaggagtctctaggactttaccgtttagcttgacttctttaacgtatttattggcgggattattgttggtcgccacgatctcgaaaataccgccttttacgtgcatagaagccttatttaccatcggacggcccaatgtgtaaaccggaatacccggacttacctgatagaaacctagggcgctcatgacataccaagcagacatctgtccgcaatcctcattaccgatgataccatccggttcgttcgtgtagaaattctgcatgatataatctaaatacccttgccctttccatggagaatctgtccagttataaagataggccatatggtggctcggctcgtttccatgagcgtattggccgatcaagccggtaatatctccggaggcttccgccccgtcaatctgggaagaggtggtgaataaggtgtctaaacgtgtttccagctctttcttgccaccgatagcggcgatgaagttatccatatcatgtggtgcgaagaaactccattggaaggcattcccttcggtatagtcgcttttcatatgcgaagaatagcgagggttgaatggagtacggaaagaaccgtcgcccattaccggacgcatcatcttcgtctcgggatctaaatagcgtttgtagtattcggctttcttggcatactcattcgccaactccatgttgcctgccttcttggcgatttgggagatacaccaatcctcgtatgccatctccaatccccacgatacggattcgggaacagagtcggcggggacgaaaccatatttctccttatagtaagggtgcatcgtgatcagatccaactcacgggttcctttgaacttctcggcaagatcctcacggtaaacggaagaacgtgcgccggcttccgcccacgtgctcatatcaccttccgctaaatctttcgctacaagatcggcgaggaccgagacggccggatatcctaccatacaacctgtataactagaggctaaaggccatttgggtaatattccaccttctttataaccttgcacgagtaccttaccccaatctgtcgctaagtccggattaatgattgtcattaacggatgaagcgcacggaacgtatcccacaaggagaatacggaataatttacgtaacccggttcggcggtatgcactttcttgtccatgcccagataacgcccgtccacgtcttgataagcgaagggggcgatcatggtatggtagagcgccgtatagaaattgaccatgactttcggatctgcctcgatctggatcaagtttaacgcctcgttccaaatatgcgttgattcctcacgggtcttatcgaaatcccatccgggcaattctgcctcgagattcttctcggcgccttccggatcgactacggataaggctacttttacataaagcggttgtgccttttcagagaatttgtaatggaacttcaaatcttccgccgtattcaggcgcaaaaacaaggagtccttacgtaatttcccgtccatgtattggtatacggtctcgatcggttccgagaaagtaatccgataggacatggagtggaaatgtgcccaaccttgtgtcttcacggtaccttccaccgtggagtcgtttacaagtaaatattggttaccgatcagcttatgtccccagttcggttgaaggatatgccctaagtcaagcaggacacgacgttctttgggattgtcgtatgtatatttatggaaacctacacgatccgtagaagtcaattccacgttgatgccaaagttatccaagcgtacggcataataccccggtgtcgctttctcagtgtctttcttgaaggtagctaccggtttgatggaatctccaccggagaaaggtaataaagctacgtcacccagatcgccgatacccgtaccggaaaggtgcgtgtggctgaatccatagatatggttgtcgtcataatggtaaccgctgctcgcgtcccatcctaagatatgggtatccgggcttagttgtaccatcgcgtacggacgggtagctccggggaatgtgtgtccatggaacccggttccgatgaatgggtttacatacctcacctcgtcttgtagtcgcggcgactccggcgcttgcttgcatcctaccagcaggcaggcaagagcggcctgaaaaaataagatcgttcttttcactgttattattgatttagtttgtaataagcgaattatcaatcatctgtcacaaagataatggctttgggggaatattggaaatttccttttaaaatctgcaacctttttcgggcttggctcgtcttatagataaaaaagtatgggaacaaacgaatttacgacaaagatattgccgctgaagaataaccttttccgggttgttttccggattaccggagacgtggagcagtctgagcagatcgttcaggaagccctgcttaaggtttgggaagaccgggatagctggattgtcattgagaacttaccttcctattgcatgatggtagcgcgtaatctggcattgagggaaacctattccggagataaggaaaggatggagcggtatgcggtaaggtaatctgtttatggatcgtgtatggactatcaacgaataaataagttgctggataaatattgggaatgcgccacatccgtggaggaagaacgggaattacgccggtttttctcctcagcggtgatacctcccgacttattgccctataaggcttggttcgtatctcatgaggccgaggcattgcctcccttggggaaagattttgatgctcgtatattggaacagatctcggaagatcgaaaattaatcactacatttggaacgttatttaaatctattactcatttaattcataagattatgggaacgaacatgaagaaagtctttaccacccttttatgccttttgttttgtatcgcgatctcggcgcaggataaagccgctgatctcagtaagctcgtaggcgattggtccttctctgcccccgacgctccgtatggatatcaagatggcagtttgcagataaagcaagagaacggcaagttgaccgctaaagtgaatatacaaggtagtaccttggagataaacgatatcaaggcgaaaggagatacctataccagttctttttatgtggatggaacgcctgtagatttaactatgacccagaaaggaaataagttagagggaatggccgacgccggaggtatgcagattcccgtgaaattcaagaaaacgaagaagtagccgctttgtggtactgtgagtttctgttaacttcgcggcaaaaactacaaagggatgtttacagtaatcggaatcatgttctgcggcattgccgtcgggtatttctttcgtaaagtagaattgctgcaaaagatcggtaagcctatttcttatacgattcttcttcttttgttcctgctgggaatttcggtaggggctaatgagtctatcgtgaataatcttacgacgttgggcgggcaagccttgttgattgcttcggccggtacgttggggagcgtcttggcggcgtggggagtttatcatttcttttttaaggaaaggagccggggatgaaagggagtttgatcgtcgtgggcttctttgccttggggtgcttgctgggatggagcggttatctgcccggggtcattatcgagaatgatataacggtttatgtactttacctcttgatgtttcaagtagggattagcataggaagcgataagaaactgaaagagattttgtcgagcatacggccgaaactcttattggtgcctctggctactattatcgggacgttgagcttctcggccttgatcagccttgctcttaccaaatggagcgtgttcgattgtttggcggtcggaagcggtttcgcctattattcattatcctccatcttgataacagagctaaaagaaccgacgctgggggctcaattggcggcggagttaggaacgatcgccttgatcgctaatattatccgtgagatattcgccttgctgggcgctccgttgttcgttagatatttcggaaggctatctccgatctgcgcgggaggagctactacgatggatacgacattgccgattatcacccgttattgcggaaaggatttggtctttgtctccatttttcacgggatcttggtggacttcacggttccgtttttcgtttctttcttctgttcgatgtgagtgaaagaggcttccgagatctcggaaaccaccttgcaaggttgaaaagtcgtttccgaggcctcggaaggcattttacaaggttgaaaagtcatttccgaggcctagaaaagctattttacagtttgcagcatcacttctaccgctctttttaactgcgtgtcctcgccggagagctgcgcctcgggagtattgtacacctcgacatccggttgcaattgttggttttccagataattgccttgcatatctttcacgcctacttgcgggataccgaacaccaaggtcggatcgatttgcgtttcccaccatacggctgtcatggttcccggaaccggggcgccgatcagcttgccgatacctaaggtcttataaacccaagggaaaccatgagcgttcgaataattatcctcgcacatcaagacacaggacggtttggtccacttattgtaaggatcgctaccgatgtattgtccgcgaggctcgaagcgctgatactccttgccgctcaataaggtagccagatcatcatgcaaccagccacctccgttatggcgggtatccacgatcacggctttcttattccggcaacggcctaataaggcggaatagacctcgcggaaactctcgctgttcatacctcttacatgtacatacccgatttgcccgttcgataatttatctacggtttcttggcaattctcgatccatcttttataaaggaggttcgattgctctccgttactgatcgcttttacctgttcctcgaaacgctgtttgctggtaggatcatagacagaaagcattactttcttaccgactttaccgcttagcagtggataataatcggcgtctttctttatcggtgttccgtctatcttctcgatgatacagcctttctttatctggctgtcggccaatgtcagcgggcccttggcgatgatttcctcgatcttcaatccgtcgcccgtgtatgcgttatcgaagaaagcgcctaggctggcggtttccggcccggttagtcccggattgtaacgagcgcccgtatgggagccgttcaactcgcccaatagctcggaaagcatctcttggaaatcaaaattgttgttgatatgcggaaggaaacgggcgtaagcggtctcataccctttccaatccatgccccggagtgtcggatcatagaacttatccaagacttgacgccaagcgtgatggaagatataagcacgctcctctgccggacgataagcgaactcggccttgaaagcgatcggtttttccttgctatccttcaactctatctttttcagtttgccgccggcggtaagatagaggttctctactttcttatcggcgaatagagtgcctcgaccgacattcttgagcagtaatttagtggacttttccttcaagtcgtgttcccataaatcaaagcctttctcgaaagcggcgcaataatatagtttatctcctttcggggcgagtacggcgtctcccaatgaggatgaattagcggtcaggcgaataatccggtccttgcggttctccaaatcaaacttcaagggggctacaggcttatccttatcctcttttttcttatcggaatctttatcggatgtcttatcctcgtccttatctttgttttcatccgcttctaccaaggccagttcttctttactgaggcggaatttatcgtaagcctcaccgtcgaagaacatgatgtacacatcccgctcagcaccccagctaccgtggctgcggaaaccggcacggtcggaggaccagatcatggccttaccgtctaatacccatttcgcgtcgccatccgaataaccgctttccgtcaggttcgttacctcgccgctaccgtccgctttcacgagggcgatatccgtattgttccatcctccgacggagatgtaatctaccaagaaccacttgctgtctggcgaccattggaaatgctggtctccatcgctatacgaatagaggtatttcccgtccaatacggtgcggacctgcttggtctttcggttgataacacgtaaggtggtgcggttctcaaggaaagccacctcgttaccatccggagagtataagggttggaacgaggtttgtccggagacgacaagaggctcctctttcaatttcggggcgtacgtgaattgcttatcttcgtcacgtgtaagtttactttcgtagattccccatgttccttcccgttcggcggaatataccaatgaacgtccgtcggggctgaaatctatattgcgctcttgttgtggcgtgttcgtgatttgacgagtcgtctcgtattcaatagaagttacgtaaacatcgccacgagtgataaacgctacctcttttccattcggggagacggcgatatccgtagctccatcggtcagaagacgatggatcacgtcgttctcgatcttatccgcgacgatctggatattcaccttggcaggtttctgaccttccttaacggtatagatctcgccgtcgtaactatagcatagagtcccggaattatcggaggtaaggaaacgcacggggtgggtggtatgcgtcgtgatttgtttctcgctgttgcctgccaaatctttcttgaagatgttaaagcttcctttctcctcgcttaggtaatagaaagacgccccatccgcagcccatacaggattacgatcctcaccgccaaaagtggttactttctggaaagagcggtcttttccaagcgtacataaccagatatcacgggtgatagaagactgatgatgcttgcgccaagggtcctcgtaacctttatagtcattgtataatagcttactgccatccttgctgagggctatattctccatgtataacgaagaatataaatccggccttcctccgtccgtgcttatctcatagacttgcataaagcgggtgccggggaattggatatccttggcatcttgcaatatgttggccagatacaagatgtgtccgttatccttaaaggtcgtgggatattcgtttgtggagtgggtggtgagccgcttgggttcccctccctccttattcatgaggaatacatcgaagttaccgctacggttggaggcaaaggctattttttgtccgtcgggcgaccagaccggacgggtgtcatgagccggatgtgttgtcaactgccgggctttccctccggaagaagggaccgtgtagatatccccttggtaagaaaacgcgatcgtctgcccgtccggggagatcgcacagtaacgcatccataacggactgtcgtctgcttgcgccgccgccgataaaaataacgccagcgcaggaatcatcaagtttttcatgtgtactctattttagatttacaaatgtaatcgattttcgatatttattaggagaaataattgcgtagattaaatttttaaatatttttgcatatgaactttaaaaccgccaagatgatgacgaaatatagagtgtgtatgacttttatgtccattttattattgctatttcattttgtgtttctgttttcttgtggaaagctaccggaaaaaacatttgctttttctgataacctgcggattgattctttggaacatatggctatggattcgatttaccggaatcctcgatatgctcattccgcattggatgaagctttaagtctaactaaagatagcgataaatattataaattgcttgcggctaaaagccagatttattttgctaatagtgtatatgattccgggtttgttttacatcggtcaattatagattattgcgaccgtgtaccgatgtctcccaagatacatggactcttagggacgctgaaaaatacggttggcaattattattcatttttggataaaacggattcggccctcctttgctattccgaggcgtatcaagagatccggcagagtgagatggagcataaaatcccggatatttatatcaatatagcggatatatatgcccggaaaggagcttacgatcagcgagcccgctactttcgccaagctcttttcgtgagtgattcattgggtattatggatcggatgtcctttcctatttattttggtttgggcgagacgtatatggaattgagggactttgacttatccgatcacttttaccgtttggcggagaaagaactggattctcgtaacttgagcgagaaattcaccttttgcaatagccggggaaattactattattacaaggaagaatacgcggaggcgcttccttggttcttgaaagcccgtgaggtggtacgtcctactcatatggatttctataccaacgtatgcgagatcaatttaggggagatctatctatgtatggatcagttggattccgctcgtttttatctggaaaaagggtttaggtacttccatacctataataataagacggccttgtaccatttgacaaccctgaaggcttcgctagccttaaaagaggggaactccgggctggcttatcaattgttgaggagttacacggatacggtaggcatagatcccaagatggtagtgatccgtaataagaacttgcagaattacttcgctaccacgggcgattttagacgtgcctatgagtaccaaacgaagaatagcgtcattgagaacaatattcgtagcgaacgaacccagatgcgtgtcgccgagatcgatatgcgttatagccaagatacgactttactcaagcgggaggctattattaaacaacaggccggccggatggaatacttggaaatgagccgttgggtttggatcttgctttttgtgatcttgtccatcgtcagcggcatggcttattactttatgaaacgtaaacggcatgcccaatggttaagccatgtcgatcaggtgacgaaactgaagatggagagtattcgcaaccgtgtatcccctcattttatattcaatatattgaaccgggagattagctcggaggaagaaggaagttcccgccgtacgcaactttccggattggtggagttgttacgtagtagtttggagatcacggaaaagcttagtatcacgttggaggaagaattacgctttgtccggacttacttgaatttgcaggcgcaaggattagggccggacttccgtctggaatggaatctcgatccctctcttgacacggacgcaatctatctcccggccatgctgatccagatacccgtagagaatgccgtgaaacatggcttgtgtgcgatcgagggcgagaagcgattatctgttttcgtggagcgcgacgggaaaggcatccatatccgtatagaggataatggacccgggtatcgtccgtttacgaatgcgggacataacggtacggggatgggaacgaaagtcctttaccgtacgatcctattgttgaataggagaaataaagagaagatcacctattcggtccaaagcaagaagaaggggatggggagcggaacaatcgtcagtttctttattccgttggattttaattacgctttctaggtatcgtgaatgtacgaaagtaatccgggccgtttcctccggatagtggatggaagcagcccggatcgaattgaatcgaatcggttgattcgggttatagtcgctcaatgtcttcaacagaaagtccggagcattgggcgataagttcggagtcaagtccttgcttcttcatctttcgggctatctggagtttttcctcttgacggcctttctcgatccctttctcgatccctttctgcatccctttttgcattccttcctgcattcctttttcaatcccttccgtttgtgcgtaatcgatggtcgcataccaatcccgataattctttaggttttcctcgtagatcgcacgttctttttcgctgagtgagttgacgttcgccacatccagcaagcgaaggaaggtctcctgttcctccttgaagggagattgttcaaataggttcatattcttcaatgtataaatccaacgttcgaaggagctcttgcactcctccttgcttaaactgaataacgggaacgatatgtagatctgcttcatcttgatctcattgaacacctttcccgtcctctcgttagcgaggacaacatccgtacggaagtctgtgaactccggcaacttgaaattcaagaagtagactccgtagatgggtagcaaccgatattgccattgcttgccgatttgtccttgccgggccaccatgcgacaaagataataaaaacctctgttaaagaaatagtgctggggacaattctgcatctctaggatgaacttggccccggacacgtcctcgcagagcaggtcgaatatgatggtacggttctcgacggtctcgggcttgatctccttgtcgaggtaggtgatgtccttgatctgtcgttcgccggctagggcggcgttaaggaacttgatggtaacttgcttgtcttggaagacagccttaaatccagcatcagtcatgatgtctacgtattgtgccatagttaaatggttttaggtgattactgctccaaaggtaaggtttattttcgtatcgcacatcctgtttattgtatatttcttaaaaagcagattcatggtagtcagctttactatttatagaaagtacgattagtattaatagtagtgcaaaatactatggatagtaatcggctcccattttgatcaattcttattatacgctgattatcagaaatataaataacaatctttaaatattaggcttattgtactttttaagagatcaaatttggtatggttgacttattcttttcacgtataaagataacattaaataatagactaagccgctagcataaagttctccaagtgaataactaatcacttctcaactcgtaagcttatggcttgacaagccttggattatacgtttgtagtatttgcaatgattgcatgtgaatgtttgtattttgtatttattatgcggttatggatggataccatatataatgtacatgcgtacattatataatagatagaaacggctagtctaaacgatcgattcttttagtcatttgcaaaggtacgcgtttcttcgatacttgcaacccttccgagctatttttttttcacttatcctctttcttatcaataggataggttatcatttaccaaacaagcgattccttcaacgaacctccctctcaagcgtctaaaaaacgcaagatctaaacgatcgtttagactagtcgttttcgagaaaaacaagggtgctaaacggtgggatggactttaattaacactattattaatattaaatttttgatttatgaacaaaaagattactacgcttttagctagtgctatgttggcgactgcattctctgcgggagctagcataaacgctaagaagggcgaggctactttgttgggtgcatcatcaaattacttatctgtaaatacagagaataattatggtgcattgagctttgatcctacaactctttctgatttaaaagagttgaatccagcaacatggactgtctctaacgtgaagacttctttaggaagaactctttattctttcgtaaataaggctaccggtttaacattgtctgtagatcctgctacagctatcgctgtggatgacaataacaagtctcaaaagatcgctagtgctgctccattggctttaggaggaagtgcttctgagtgggttgttgagacagtgggtggaaaggatatcttgatttcttatattgatggtgagaatgttgtttatatagctcagtcaggtagcaaactttatttggagaaagcaaagaaaagtgcaatctctactgctgctatagctttgtcttctgaccaagcaaatattcctgcaagtatttctttggatagtgacgcattgaatactttattacattcagtaaagggcaataatgcagctatcgctaaaatgttctttggcttaacgatgaatccggagacttcagggaataataagaatgttttaactgctacagctttacatgcaggggatcaggaatttgatactcaaaatggaggctattgggtaacattgcaagctaaagaccaaaagattggtgacaagaaagcatatgttgtagttgataccgcttattatgacggaacagagactagcaagttcttgaagtttgcttgtgatgaactaaacgctgatggccgtaatgagggttcttataaatttaagttcacttataacgctcagagagatgagctgtatgctcaagttcagaaggctgtttataagattactaaaaacggcggtgtatctgatgaggatttcgctaaatgggtgaaagaggagaacaacaactctaattgggtactttctgataacacagcttctgctaagggaactcaaacagcagctattgataaatacatttacatggctcgtttggccggtacgaatgtattgactgttaatacagatgaaacagatggtactactgctggtgctcttgttgctgttaaggatgttcagaaaacagttatcaaacttggtacaaacttcacgggtttgactcaaacaactttggcagacggtgtttatatgattcaatataaatctactggcggtaataaaccggaacaaaacaacgcttatgcattggctaacttggctggtaattttggttgggcaaaacaagcagatcgccaagatttcaaccatattccggcagctcagtgggttattacaaagaatggtacggcttctactgcttctattacgatccagaaccgtgagttcaacgatttgtctgataatgctgtaggtctgaataagaaaactgttcagctgtatgctgtaaaagatagcaaagatgtattcttctataataacggtgttgctgatactttgagttttatccctgttaaagacgctaataacttaaaggttggttacagatacttgacagaggattccgctaaggttcagacatatgtattcaattatttacatggtttggcattagataaatatttgtatactccggctggtaaggattctatcgttcgtgtaaacgagaacggtgataagactaacttccgtttggagatcgtggttaagaatgataactatggtgttggcgatagcttggtaagaaatgtttactatgttaagaatggcgagagctatttgtcttacgatgatgttgctaaaaagtatatgatgaagaaggatactaaaactccgttcttcttaaaagaaaacaactgtgtggacggtaagcactattatgcgttagttgaagctgaaatagtaaaagtttatgataaagataataaagaattcttcatcgtaaaagataattcagaagtaaaggctcgtgcttctgttggtgcggcagaatctataattacttattcatctgatgaatatacgaatggtgtaaaagtttctgttgatgataatactctggacttattacaaggttctacagatgataagttcaatcaaggcaataatcgtgaacttcgtacatccgctttcgctgtggtaacagatgactctccattataccgtcgtttcaacaacgtagcattgggtgagagcgctacagacgcttgcgatagcttggcattcgtagagagcgtacgtggtgagtacttgatggatgagtggaacaagaacttgcaagacaaggtggttaactacgctggtatctggaataaggataaagctaatggtaaattgttcttccatatcgatacggcttgggtaaatcgtggcgcaggtaatatcaaacctcaatatttgatctctgcggctcacgtagatgtaccgggaactccgggtgtaccttgtacttatgcgcataatcactatgataatgctggtaataaggttgatgctgctcactgctcacacgctactcctgctcacgctggctaccactatggtaaatatttggtaaacttctctgattcagcgaaggtctatgatgaaagaaaggttgctaatccgtataaattaagtactaactcaagtgttaatagcagctatactcgcgttggtttcgttgaggctattcacatgggtgacagcttgtatgtattgacaaatggtttcgagaagatggctccggctgatttggatacggctgaaatcatcgctaactataaaaaagcaaaaattgaacatttcattgtgaacttgacaggtgataaacataagaacgtaacttggtctttccgttatgtaaatcctgacaaggctggaaatgtaacagaagaaggtgcagataactctttcttgtttgagtctaatgtttatggttcagcggaagttaatggacaaccggtttatgatgatcagtatacaactgtttatggcaataaagatgaagcaattgctccgaaagagaatgttgcttggttgaagatgcataatggttgcttggtaatcacagatgagaacgctaagttcgataatgctaagactagcggtgacggtgccttggtattcaatgtacaacgcatgacagaagatgatgaattcgttacttctaacgatgagatcgctactgaaggtgtatccgtaatcgcaggtaacggtaccgtaaccgttcaaggcgcagctggtaagtctgtagttatcacgaatatcttgggtaaggtaatcgctgagaccgttcttacttccgataacgctacaatctctgttcctgccggtatcgtagcagtggctgttgatggtgaggaagctgttaaggctatcgttaaataagaatttaacaaaataagataatcatacaattcccgtgcgggtatcgatccaagtaatccgtgacggatgaacaggcgggagttggattaatattaatactaaagtaataaattaagaggtccgtaagtacctccgtgaggaggaagtacggataaaggaacaagaggatgcgtcgatataatgtacgcatcctcttttgtgtttatagcgggtgttgaggataaatcctgcttctacttgcaaaagagcgagataagcaacggcacgctgatctcgaggataatcccgtgaataatagccacaggtacgatattctttccggaataccggctgataacgggaagacaaacatccatagaattgattcccgccacggataccggagcgaatttaccaaagaaagaggcatacaacggtgccccgaataaagctaacatttcccggatgatattagccaataacgcgatagccccgagttgcgaagcgatttctatccctgccgacgcctctttcagttgtacgataagcaaggaggataaggaataataagcgaatccgcttcctacagccatacaatcatatatattccacgaggtcaataacaaactcgccgccgcagagaatactaacgtgccgatgatcgtaaagaacggcagtaacaaactggaaaaccggatatcctttaccatctttcctaattcggcgtttgctcccagattcaatcctacttggataacgagggcgtatagcaagaattgcggtagtttttcgcaatacgtggagatagtcgtgttggcgaaggttccgcaaaagattcccgctgtgaaacataagataacgattaggttatttttcattgagacctcctttcttgataaataatttataagcgataaaagatgctaccagacttcccaatactccgcaaatagctagtatggcagcttgtattccaaactcaccaatattattcagcaaagattggttggctcctatggtaataccaaatatgaacaacatcgcgaaaatcgtataagagatggaatgttccaatcccttgaaagcggggacgtgtcggcataaataaccgacgcttatccccagacctaatagacctagaatgataaacataagcatattgtattttgagatgcgcaagacatcctttccccggaaacgaagcatacgaatactccctcttttccgcagaagttaaacttgagtgcaattaatacctagatgtaggtgtagaagagaactataaaaagaagtcctctcaagaagagtatgaatggatttagacaaaaccgctgaaccaatgaacatgcacgatcgtgttacccgagaaagctcgggtataccatctttttgagttgttcagaagcttcttgttcatcttatttgtatcattgtttgatttctggcgcaaaggtagtaataaattagagattctaaaactttttctaggatcggatatataagggacttgacttggattttggatctttttatgtacatttgaggtcctacccgctattgggccaactaaaaacggatagaacagatatgattaaaagataagattggttatgaggaaaagaatgattttaacagcattggcggctgtcgctatccctacgttgttgatggcggcggatgaggcgagattaatgcgctttccggctacaaatggttcagagattgtattctcgtatgctggcgatttatataaggtcccggctacaggtggtgaggcacagcgattgacatcgtatgtggggtatgagatgtttccccgtttctccccggatggtaagacgatcgcttttacgggacagtacgacggtaacacggaagtgtacacgatgccctcttctggcggtgagccattgcgtatcacttacacggctacgaatagccgtgatgatctgggcgatcgcatgggcccgaataatattgtgatgacttggacaccggacggcaatggtattgtttaccgcaaccgcatcagcgatgggttctccggtaagttatatacggtaaataaagaaggtggcctttccgaggtggttcccttgcccgagggcggcttttgtagctattcgcccgacggaaaacaattggcttacaaccgggtaatgcgtgagttccgtacatggaaatactataagggcggtatggccgatgatatctgggtttataatccggagaagaaaagtgtagagaatatcacgaacaatgaggcgcaagatatctttccgatgtggattggtgatgagatctatttcctttcagatcgggattacacgatgaacttgttcgtttacaatacgaagactaaacaaacaagtaaggtgacgaacttcactgagtacgacgtgaaattccctagtagtttcgggaatacgatcgttttcgagaatggaggctatatctataagatggatgcggcgtcgaagaaaccggagaaagtgaacgttacccttgcctccgataatgtctacgcacgtagcgagatcaaggatggttccaaatatatcacgagtgccagcctctcccccaaaggtgagcgtatggtggtgacagctcgtggcgaggtattcaatatcccggtagataaaggggttacgaaaaatatcacccgtactccgggagcgcacgaacgtgacgctcaatggtctccggacggaaaacatatagcctatatctccgacgctaccggcgagaccgagctgtatctccaagattccgaggggggcgagcctacccagttgaccaagaataacgatacgtatatccgtactttccagtggagtccggattccaagaagattgtctatacggatcgtaagaatcggatcaatcttttggacgtatctaacaaacagctaacaactatctcacaaagtctgttaggtgaagcccgcaacgtaagtttctctccggataataattggttgacttattcccgtgtgtccgataataatttctcgatcgtctatgtctacgatatcgcgggtaagaaagaatatcccgtgaccgataaatggtacgagtcttattctccggtattcagtacggatggcaaatatctggtattcacttccgcccgtgatttcaatcctacgtatagccaaacggaatggaatcatgtgtataataatatgggtggcgtatatctggcgttattgtctaaggataccgcttccccgtttatggaaacggatgcggaggtcgccattgaatctaccccagcgaaagcggatgcctctaaaaaggacgagacaaagaatgaggcttctactccggtcgtaaagattgatatagagggtatcacggatcgaatcgttaagctccccttgccgggatcgaattactacgatctttattccgatggaacgaacgtgtattatttcacgaaaggcggcatgaagatgtttgacttgaagaaacagaaagaggaaaccgttagcgatgccgctatgatggttgatccggctggcaagaaagctgttttctttaaggacgatcaactattcgtaaccgatataccgaagggtaaagcggatttaagcaagccggttaatctggcgaatatgaagatcacggtagactatacgaaggaatgggcgcaaatcttcgatgaggcttggcgtgctttccgggatggtttctatctggagaatatgcatggcaaggattggaaggcgatcaaggagaaatacgccgcccttcttccttacgtgaaaacacgtttggacttgaattatattattggcgagatgatcggcgagctgggagtagggcatgcttatgtgaaccccggtgaggtggaaagtcctaaacgggtatcgatgggtctgctaggtgctgaggtttctcgggataagagtggtttcttccgcttggaaaagatcctgccgggggcttcttggagtaaggaattacgttctccattgacagagccgggtgttgaggcgaaggccggagagtatatcgtcgctatagacggagtacctacgaatagcgtgaacgatatgtataagttgttgatcggaaaggcgaacgttccgaccgagttgtctttgaatagcaagcctcagttggcgggcgctcgtaagatcgtagtcagtccgttggcggaagagtattctttgtatcattataattggatccaagataatatcaagaaggtggataaggcgacgaacggtaaggtcggttatatctatatcccggatatggggccggaaggcttgaatgagttctcccgctatttctatccgcaattggataaggagggtttgattatcgatgatcgtgcgaatggcggtggaaatgtctccccgatgattctggaacgtctgtctcgtgagccgtatcgtttgacgatgcgccggggttcttctttgatcgggaccgtgccggatgccgtacaggtcggcccgaaagtttgcttgatcaataagtattccgcttccgatggcgatttgttcccgtggggcttccgtgcgcttggcttaggtaaattgattggaacccgtacttggggaggtatcatcggtattagcggcccgcttccttatatggacggtacggatatccgtgtgcctttcttcacgagctatgatccgaagacgggtaactggattatcgagaaccatggtgtggatccggatatcttgatcgataacgaccccatcaaggaatggaacggtgaggatcaacagttagaccgtgctatcgaggaagtcatgaaacaattaaaagaacgcaaaccgctagcccctgtccccgcaccaagggactggagccataaataatgagaggttatttgtagagacggggcacgccccgtctctacaaataaataaatagtaaacggattaaaaactagtaatctatctatggaacgattcgcagccattgactttgagaccgctaatggaaagcggagcagtatttgcagtataggtatcgccatattggaggatgactgggtagtagatagcatttataccttggtacgtcctacccctaatttctatacccgttggactacggccatacatggattgactgctgaggatacgaatgacgcgttatgtttcgaggaggcttgggaaagcatcgccccgaaactaaaggatctcccccttgttgcccataacagtccgtttgatgagggatgcctgaaagccgcccacgaggtgtatgacttagcctatccgaaatatcccttctattgcacttgccgtctctcccggaagatgtacccatttctggtaaatcatcagttgcagacagtagccgcccactgcggttacgaccttacccgacatcataacgccatggccgacgcttacgcctgtgcccatatcgcccttacgatgatgcgggaaaaagaggtcgataccttggaggcgcttatggcttcctgctactctaggtaactatggggtgtttttcccggctattttatccaccacgacagcgatagcgccatctcccgtcacgttgcaagcggtgccaaaactatccatggcaatataaagggcgatcattaacgcttgcagcgtctcattgaatcccagcatactttgcaagatacccaaagcggccataatagcccctcccggaacccccggagccgctaccatcgtaattcccagcatcatgataaatccgctgaagttggagaaggtaaccggttctcccgccatgatcatgatagccatagcgcaagctacgattttcatggtgctacctgccagatggatcgttgcgcaaagcggtacggtaaagatcgctatattctcccgtacgccattcttgacagcctgcgccagtgtcacgggaatcgtggcggcggaggattgggtccccagagccgtagcgtaggccggtaacatattcttcaagaggcggagcggattcttcccggctatggctccggctatcgtgaattggatcaataacaataatacatgtaagacaaagatgactatgataaccttgaggaacatcgtgataatactcatgacttgtccgctcacggtcatgttcaggaagataccgaaaatatggagcggtaataacgggatgataaccacctcgattagcttaatgataatttccttgaaatccgtgaaagagtcacgcagggtggttcccgctatattagaaagccctaggccaatcgtaaaggatagcagcaaggctgtcatgacatccattaaaggcggcatatttaccacgaagtaaggtgtcagcatgaaatcttccggattttccatcgccgtcaattccgtgttggtcggtagtatgtgcgggaatatagccgatccgctcaggaacgtgaagaaacccgagaagactgttgaaccgtaagcgatcaaggcggttatcaacaatagctttccggctcctttgcccagatctccgatagcgggagttaccagccccaatatgatcagcgggatggagaacgataggaagttgccgaacaatgaattgaaggttacaaagatacgtgcgattcctcccggtaaaaactggccgaacaatacgccggcggcgatagcgataacgactttagttaacaatgatactctgatcttcttcatggtgttgctttattttgaagccaatggcggccatcgtaatactcatcaacggactgatcaggttaaagaagcaataaggaagatacgtcagagtcgctacgcctaatatcgtggcttgcgtcatgccacaggtgttccacggtaccagcacggacgttacggttacggaatcttccgtcgtacggcttaacaggcgactctcatatccttttttcttgtagatatccttgaacatatttccggtaaggataatggatatgtattggtcggccgtaacgatattcaagaataagccggaacatacggtagacgccaccatgccgaccctccgtttcataaagcgaaggaatacagacgtaaggctttccagcataccgctggccgtcatggagccgccgaagcacatggcgcagatgatcagccaaatcgtattcatcatgcccgccataccccgggtagcgaccaagctgttcaaggcctcgttgcccgtattgatctgggtactcccgtagaatgtcatgaataatcccttaaacagggaggaggcatccgctaccgacgctcccgctacctcttgcaataaatgaggctggaaaaagatcgcgagcacccccgccatcgctgtcgagataaacaaggtgatcaaagacggtactttcttggcgattaatatacccgttaccaccggtacgatcagtagccagagcgagatattaaaactttcgttcaacgaggcggcgaactcggctatttgcccggatgcgttcgaggtatgcgtaaaacccgctatggtaaagataatcaacgtgatcaccatagacggtattgtcgtaagcatcatataccggatatgggagaacaaaggggtatgcgttacggaagaggctaataccgtcgtgtccgaaagcggtgagatcttatccccgaaataagcgcccgagatgatcgccccggctacccaccccgtagcgaagccttgtgcctcaccgatacccatcaaggcgataccgatcgtggcgatggtagtccacgagctaccggtcataacagatacgacagcgcagatcacgcaacaagaggccagaaagaaactcggatggatgatttgcatcccgtaataaatcaaggtcgggacgataccgctgatcatccagctaccggataaagcgccaatcaacaataggataattatagctgtggccactcccaatatgtttttacatatcgcctcttcgatatcacgccatttgactttacagaagatcatggccaaaagggaggctaccgccgtggtggtaagtaatacgacttggcttccgccgctcaacgcgtcgctgccaaaagtgcgtatggttacaaacaaaagagctaccagcacgaggataggcactagtgaaagtagaggggagggcatcttcttaagatgattttccattgttcattcagtcgcttaaataatgatggtgcgaaaatactaaaaataccttgaataacgctatgaattatagattgatttccttatttcacagtcttttggacgatcttataaccggttgccgctataagaatgctcataaacgggctgacgatattaaagacgcaataagggaaataagtccaagtagatacgccaaggattgtagattgcgtcatgccgcaagtcgtccacgggatcagcacggaggtgacggtgacggagtcttccgttgtccggctaagcaggcggctctcgaatccacgttgcttatatacttctttaaacatttcgctgttcaggatgatggcgatgaactggtccgccgtgcagatgttcaaggataatccggacacgacggtagaggcgaccatgctggtacggcctcgcatgaaatgcaagaagatacgtgtgatgctttccagcatgccgctagcggacatggccccgccgaaacacatggcgcaaatgatcaaccaaatcgtgttcatcatcccggccattccccgggtagagactagagagttcaaggcctcgttgccggtctgtatctgcgtgctgtcatagaaagtcatcagcaggcctttgatataggcgataatcccactatccgtgatcccggaaatctccaataaggcgtttggctggaagatcaaggcgaatattccggcgagtatggaggaggcgaaaagcaccacgatcgaaggtgtcttcttggcgatcatgattccggtaacgatcggtacgatcataagccaaggcgtgatatggaacgagccttttaaggcttcggagaaagcggctatctgggatgcgtccgctgtctccctcgagaatccggcgatgcagaatacgatcactgtgacgatcatagagggaacggtcgtataaagcatataccggatatgcgtgaaaaggggcgtgtccgttacggaggccgccaataccgtagtgtctgataacggcgacatcttatccccgaaataagcgcccgatataatcgctcccgctacccaccccgtactgaagccttgcgcctcgccaatcccgatcaaggcgatcccgatggtggcgatggtagtccacgaactacccgtcatgaccgatacgatactgcatagcaggcaacaggccacgaggaagaaatccgtttgcatgacttgcaacccataatagatcaaggacggcacgatcccgcttaccatccaactgcccgatagggttccgatcaataaaaggatgatgacagacggtgcaatcccatagatgttacgggcgatttgcccctcgatatcttcccacttgatcttgcaatgaaagacggcgatcaaagagcagatcgaggtggctatcaataatacgatttggctggctcctccaagggaatcgccccggaaaatatagatggctacggccagcatgatgactaatgtcactacgggtagtaaagagatcgcgatggagggtgtccggggcttttctgccatgggtttattcacttcgtttgttatttatcatggataatccgaataaattctttatacggaccttccttgtgttatcgattctaattaatttcactgcaaaaataaaaaaggatttggataggagggtaacttatggtagtaaataatcggttaggctatttatttgtctttttggggatgagtatggcgctatatgcccagcgaaagacggaagtgatccgttatggcgatctggatcagtgggtggtacgtaagatcacggaatcggctattatcgggaaggagacgaagacactttactgcgttggccctatggatacgattatcggaaataaaccttttgagtcgaaagcttcgccttggggcagttctaacgtgatggcaagggtgagcgggattacgaaagctagcgtcagtgtctaccccgaaagacgggatgaggggtattgcgcacggctggagacgggtatagaatcgatctcggcgatgggtatcatgaacgtgaaggtgctggtcggtggatgcctctatctcggccgttttctggaaccggcgaagaattcttcggagacgtgggggcagatcgtttgcggtatcccgtttcaccaaaaacctacgtccttgttattcgattataaggtgaaactctccggtgatcccaatcgtattaaattgagtggttttagcaagagatcggaggtaaatggcattgatatgcctttggtgaatctctttcttcagaagcgttgggaagataaggacgggaacatatatgctaagcgtatcggtacgctggtaatccggatggatgaaaatacggattgggtaaacgatgccagtttcacgatcttatacggcgatatcacgaaacgtagcgattatgaagaatatatggggtttcaactcggtgagtccgcccgttatagcttgaacagcaaaggcaagaatgtgcccatccaagaaatcggctggggaacggaggacgatgaggtaacccatatgatcttagagttctgttccagtcacggaggctcatacatagggtctccgggaaataccttttgggtggataatatccggttgggatattgatcctattatcgttgaaaccctatggtatttgtctccggtcttgatacagaagccaacaaatgaagcgtagcttgttttattctatggtttcgtgatcagaatataatagtctgatattagcctctaatattctgaatccactcccatggtcgtgcggcataccatatttggggccagatttatagctcccgattcttatatcatacattatcttcccatcggttaagagtgatataaaacgttcaaatgatggctctgtatatatatcggctttattgaagtagaagagttccttacctccttcttttttcgtttgggcagttacatataataagttctttagcttctttgttagtgctttttgaatgtcttgataggtgtaacctacgctacaatctaacagctcttttgtatttaagtcaaatactcctattaatattgtcttggcgacagggttgtttaggagtttaaaagaatatttcttcatatatgtgttatagctatttgcaaacatagacgtatgcaagctatttatagatggtgcatcttcataaggtgtgccaaatttatcttttaaataagcattcgcacgtttgggaaatgagggacttttagtgaatagggtaacgtaagagcatgaagcgccgcgatgagattttatttcgaatccagctaaatcgggctcgtctaaattgttctcgacaactccgatgtaatcttcaaatgtttttccaatcccagtattgttggctctattgcttggaacatattccaaggatttaacctctttgaactttgaaataataaaatccttattctccataacgtattatattaaatatgagtaagtcaataatatctctatctttggaaaaatcttcctctgatatgaatagctgttctatggtaatgttgaaatagtggcatattttatagatctgactaagggtgtacttatgtggaaatttagggctttctatactccctattaagcccggagccacttcgaggagattcgacaactctttttggctaacattgttggcctctcttagctcctttatcttaaggatgatttcaagttgatactcggtctttctaatcattattgttatttttgcccaaaaatatagttttatatatgcttatgtactcacaatatgtgagcaattgagtatatttgcactcacataatataagtaaggaaggtatgtacaaaagaacgattgataataggtggagctttaaggatgccgataccaaagaatttactcattgctatcatgcgtatcctgcgatgatgattccccaagtagcaagagctctaatagaggaatataagccagaggatggagttgagctactttttgatccatatatgggaagcggtacatcgttagttgaggcttctataaaaggtataaacgcgataggaacagaccttaatccattggctagattgatgagccatgtaaaaacaacccattatgatttatcttgtatcagagatactttttcaatgatgcaagccttgttctttgagtattctgaagataaggtcaagaataagaatttcgataatatttctaattatacttattggtattccagagatagccttttgcgcctttcttatatttatcaagtaattaatgaatgtgtggctttagatttcgctgatttctttaaagtccctctttccgagactgttagagaggtatcgtttacgaggaatggagaatttaagcggtttaggatgaaggaagagaaaattaaagacttcaaaccggatgtctttcgattgtttgaagaaaaggttataagaaatataaatggacttgaggagtttaatagtataaaatatccatgtaatatagatatctatgactttaatagtactatagaaatcccttccgatataatacagccgaatagtgttgatatggttgtaacctctccgccttatggcgatagtagaacaaccgttgcttatggacaattttcaaggtgggcaaatgaatggttcaattttgaaaatgctaaaacactagataatctcctaatggggggacgagttcagaaagaggaactttttgagactaaaagcattaaatctgaactggacgaaataaagagcattgacccaaagagaaatttggaagtggtctcgtttcttaatgattatagctgttctataaagaatgtcgcatctgtaataaagagtggtggagtcgtttgttatgtcgtagggaacagaacggttaagggggttcaaattccattagattactttactgctgaaatgtttgagaagaatggttttacacatatcgatactattgttagagaaatacctaacaaaaggatgccttccaaaacaagtcctactaatgtggcagggaagaaggttagtacgatgtgcaatgaatatatagtcatattggagaagaaataaggaaagaggctgttttatttgactgaattgatagccaatggctcctagtgtcgagttctttctttttgacagtttgtaatcttaacgcccgtagaatcgattattgcgggggaatgtacagtctactcttaaatttgagttaaaatatatttaatcgcttgttggatagttggatatcaaaagatgctcttttgttctagcgaaactagctcatcctaattcctattttatgggatgaaaaacctatctcaatgggttacgatagggaagtgacagggttatgatggctattcttgatagttcacgaccctattcttgactattcacgatgcccaacggcactattggcgttgccaaacacgaccgatagcgtaggcttttgtcgatactcgtgtgtaaaaagtagtactttgccgcataaaacgccgcttacaacctcctttttcccattatcttgcctcttttacgaataggctatgtcacgatatgcgctttatttcggtcaaaaggattgtataactgttgttttactgacaggtggattcttgctgaatataacctgtctcaaaacaggcttacactgaaagtattccggcattagataaataacttagagcgaaatagtctgtgttgagagtaaataataaatagattattggaagtgggaaataagctgcttttaatgtacgtgcgtacattcttacgccgcatggttgaagatgcaaaacggttgtttggtattgactcgtggcgactctgaattcaatgccgctaagactggttctgacggtgccttgatcttcaacgcataccagaagactgacgctgaggatatggtaacatctatcgaaggcgctgacgctgaaggcgtatctatcgtagcggtagctgttgacggcgaggaagctgtaaaggcaatcgtgaaataagaaataaacgaaataagataatcatacgattcccgtgcgggtatcgatccaagtaatccgtgacggatgaacaggcgggaattggattaatattaatactaaagtaataaattaaagttcatccgtaagtacttccgtgaggatggaagcggataaaaaaacaagtccttggcaatgtgttcgcatgccgaggacttcgtttttatacttgccttcgtcagacctaatgagtgtatgaattgtttaattctgcgtaagcaactcggtcagcctcttgaccccttccgaggccccggcctgtatatgctcaatatcgttgcgataagtacgtacatctttcgggtcgatcaagtagatcggttggccccggcgcacgtagtttagcaatccggcggcaggatagacgtttaaggaggtaccgataatcacgaagatatcacaatcttccaccagcttgatggaaggctctatcatgggtaccgcctctccaaaccatacgacgaaaggacgtagctgatttccgtgagggtccttgtcacccagatgaatatccgggttctccggtgatagatcgtaggtcgtgtccagatcccttacggagcatgccttcatcaactctccatgcagatggatcacgtggctgctacccgcacgttcatgtaagttatcgatattctgggtaatgatccgtacgtcgaaatctttctccaaggcggctaggccgaggtgaccggcgttaggtttcgtattcaatagctctcttctacgctggttgtagaagtcgagaaccaattttgggttagcggcgaagccttctggtgtagctacctcttctacacgatatttctcccataacccgtccgagtcacggaaagtggagatgccgctttccgcgctcattcccgctccggtaagtatgactaactttttcatctgttacttgtttaaaatgtatagatgtatatattaatagttacgaagttacgactttatcttgaaaaagcgatgaataattacatttcatcgctttcttttatatcccaaccgttaatttttatatcgatcggactataaccattgaatgatatttcaattgtaaaatcatgttcattttctaaattaatattgggatttttcccaagaagttctccgataaggttttcatcgtagcaaactgtatttgtttcatccactatctgtaaacgtggtatccggttcttatcaagtttcattacattgaaatcagcggttaacgtattactctcttttgcgaccctcatataaacaggtatataaagaatcggatcgtcatgggcgaacaatgatgaatatccatatttaccattgttgtcttcaatatagatgttatgagatatgtccttatccaaattatgagcaataacacggatatgatttgtaatctgttttagatttatccaagcaatcattttttcgtgttcatccaatgctacagtctcgtgtatcccatgatatagtaacttgggctgatctgtaactcggttatccgtatcccgtttcaggaataagaaaaaatcttctatatgtgtttgacccggtatgcatgttgttattccgtaggttgcctcgttataacccgcccatgttacaaattggtaacttccttgtttataaggaagttccaattcgtaattatcatcgatccatatcagagaatcatttatttgtgaaacgaaaatacctttgtcatcaaaaatgaatacagataaccgatcaaccccatttttgttactttgggtatttgtaccggtcggataccggaatttaagaacgatgccggtattgtccggaatgcattcaggtaaattttcttttatacagctcgtcatcgtgaacgaccatgtaattaatactatccattttaaataggctttcatctcacagataaattttaagaattcatagatagtgggctatagatcatagtcttcttcatagacttcccatggagttatttctatatcagtacttatccatgtttctgatttaatcacctctccggtatcgaaattgtctgaaggatttcccggagcttgtatgctatggatgtttaccttaaaatactgattccggtaaacgttataaggtgcttgaggtgacgtagcattggcattgacgaaaatgtggaagtaacagataccatttgtaaatgtattctcattcaatatgtatgttccgttgtaaagaggcatccccggagtatttttactgcaaagatcggcatattgttgtgctatagtcccatttacaaaatagttggcaataccgtcggctgttctgactacatagaatgttttgtcggaattattgggattactgataatcgcaaaatctgccggttgggttgggctgggatttgaagtcgatattactttatctggcgtaaacactccgctgacactaataaaagtcgttccgtttacttctgtttgatccaagctgtatttgaatgagttctcaggtgcgtaggaaaaagtgaccggatcgtccgttgaagtataggtgtttatggcgtccgaccctctttcgaaatccgatacggaataattttcccaattatagtccttgataatcccgtctcttttatcctgtatgaaatagaactttttattcaagttcctccaaccgaattttatctccgtcatgtttcctcctccgtttacaacaaagtcattagctttgaatactgctgctttcgctacaacgcgggaaaccggtatagccatgcgattcgtttgggcaaggctttcattttcatataagtttgcagccggggtactttccggataactcgtgttgaacatgacaaagccatttgtcagatctgccagttgcgagatttcttgggcaaattgattgtaactgaatgatccgagtccattggctgtgatatagttgaccatatctgtattgaggttcactgctgcaaaaatatatttatcggcttttttagttttgatagctctgtttgttacccaagtggagctaccgggagatttgggggcaagagaattgtcgtctaccgtaaattcggcaactgtcggagtatttggggcatcggtatcgtagataaatacatgtaaggtcttgaccttgttctcgtccgctattccctgatcaatggcacggcccgaagtggctttcgtcatagtggtgtggggaatattgatagcgatagaggtatatgcgtccggcatatcggcattcgggtctttagcagatccttgaggaagctcgttatctttactgcatgcagtgatagctaatgccgcaaataacgtaatatacaaattgtttgttttcatatgcctatattttttagtgaatacttatattattatttaattcatccggtttggcccggttgtcctatagaacacccgttctgtccaaatagttatattttcttgggaaatggaaattctttaaaagacaatgagtttggttgatggaacaaagggaggaggatttgtgttctatctgaaaaatgcatcatgagaaaatttatatatatcctggtcgtttttcttttttttatatcctgtaatgacgagacagggatatctgtcggaaatgatgtaggtggtataaaaatgagattggtaataacgagtccgtcttctaccgtttattctaagacaaaagctgagattgatcagcccactcatgagtctttgattagtgaagttcaggtattggtatttgaggaccagaaataccggtatcgggtacctggcatatctatcagtagtaatatggcacaaacaacattcacggtacttctgaaatcaacctccttgcctgtggaattgcttattttggcaaatactgacgaaactgttgtttccaatgaaccgtcgttggacgatagtaaagaggtcgtaaaaaagaagataaatcgggagtttgataatttagtttccaatttcccgatgtatggcgaatataaatttcctgccggactgtcatccaccgaaatgcaagaaatcaccgggataaagatgttgcgctccatagcccgtgtggatgttgttgctaccgaagctgcaaattttaaactggcgggagtaaaagcatatcgtgctaataattcgctgcaagtgattcccaatgaaacgggttctatgaaagtaacgacaccaagcgttcccgacggaagtatggcaaatgtaagcagccgtatgttttcggtctcagaggaggatcggaatgaattctccgcacaactttatttgccggaggtcagttctccagccgaaggcgaccgggtgagcagtgcgacgtgtatcgttgtaggcggttactataatggaagtgaaaagatgagttattatcgtatggattttgacccggacaataaagagaatgcttttgggcaaatcttgcgtaatcacaaatatatatttaatgtgaaaaaggtttccgctcccggatgggataatcctgacgatgcggcgaacaatcagtctgcacatattgtggcagaagtgcgacaatgggatgataatacgatcgatatgtcttttgacggagagcatcatttcggagtttcctcccgtgaaatcatattgaagaataaggctggttctaaagctactatagaggtgtttaccgacttgtccgactacacattacagtgggcggatgagaatggtatgccgattggaagtgaggggcaatcattgtcaaatgattattttaccgtagaaaagaatctggacggcagccagttagttgtaacggccttacagaataatatgtctggcgatgctgggccggtccagaactttgtcattactgctcatcggtggaaaatcttggtggcgatcaagcaaaaatatagcgtagcagccaatacggtaattaatttgttgacatttaatgtcggcttaggcagtttaggtactaatattgttgcttcggtacctcccgacgcacgtgcagacggtttaagaggcatattggataatcaaagtaatttcggtccgaacgggaatgtcgtctgtggagggtataatctgatacggtccaacgttagtaataatagattgacagatgccctttttgctgcttttgatgtcgtatatgtccattatatgagcaatggttattttggaaatgaagatgcgaagaaagtacataattggttgaatgcaaaaaagaatcgtgtgctaatcgcttcttatgacgctgcggatgtaagtaaatatctgatcgatgaatttttaggaggaaatagcaatataaaatttttgactgtcaataatggtgagtttaccgtagctccatcaagtgcggataatagtttcttcacttctactggaccttttacaagtggatcttatactccggtctcttcgagtttctcatttcgtaactacgatgcctatcatggtgagatacttttgaacactgagtcggcaaaaggaatcacgccactcttgactgggaaggctggtggtatcgtattaggagtagactattcgagacggatcgtttatataggagatacggatttggggaattcttcatctgggactggaggtacaaaagataaccggataaataatacttcaggagagataaataatgatgcttccaaattgatagccaatgtttttgcatggataaccaatgtcgtattatatggggaatagggaaaagactgaggatgtatgtcttttgtttgttctaaaaagatttgaatgaaataaaaagttcttacaaaatgctgttatacgattaaaagcattacttttgtggcttataattagttgaacaagaaaaaagaatggataaagtaagttatgcgcttggcttaagtatcggaaataatttccagaactcaggcatcaaggatcttcaagtggaagattttgtacagggattgaatgacgtcttaacagaggcaaaacctgctcttagttatgatgaggcaaaacaagtgatcaatgattacttcatgaagcttcaacaagagaaactggaaatcaataagaaagccggtgaggagttccttactatcaataagcataaggctggtgtggtagagttgcctagcggtttgcaatacgaggtgctgaagaatggtacaggcgctaaacctacggcgaacgataaggtaaaatgccactatcacggtacgttaatcaacggtcaggtgtttgatagctccgtacagagaggcgagcctgccgtattcggtgtttcacaggtaatcccgggatgggtagaggccttgcagttgatgccggtcggttctaaatggagattgtttatcccgtctaaccttgcttatggcgagcgtggggcaggtgaggctatcgagccgaatagtacattgatcttcgacgttgagttattagatatcgaaaaataatatataagagttaaagaaaaatgaaaaagttaagtgtattagtcgctacagtgattgtagcaatgggcgcatctttcacctcttgcggtgattctcacaaaagcgcgagcttgaagacttccatcgatagcgcaagctacgctattggtatcagcacaggtgccggttataaggaaaacttaaagactttgccgggtggcgaggctaacgtagatgatttgatcgctggttttatccaagctatcaaaggggattcttctgcgatgaagatgaatccgcaacaggctcaacaatatttgcagacttacttcgtagaggctcaggctcgcgaggctaagaagacaaaagaagagggtgataagttcttggcggagaataagacaaaagaaggcgttatcacgactgagagcggcttgcaatataaggtagagaaagaaggtacaggcgcgaagccaaccgctaccgataaggtaaaagttcattataccggaactctattggacggtactaagtttgatagctccgtggatcgtggcgagccggctgagttcggtgttggccaagtaatcaagggctggactgagggcttgcagatcatgccggtcggttctaaatatatcttctggatcccggctgagttggcttatggcgaacgtggcgcaggacaagatatcaaaccgaacagcgtattgaagttcgaggttgagttgcttgacatcgtaaaagaataagtagcgaagaaatagaaacggaacgtttgtaagataataggcgggcaaattatgctaaaaagcattttttgcccgcttttattatttattgattacttttttctttcagaatgatatatgattcaaatttattatatacttttgatacattaaatctgaatgcatataataaagcgaatttaaaatggagaagatagacaaactggaccggcagatattgaacattatttcaaagaatgctaggattccttttaaagatgttgccgaggagtgcggtgtatctcgtgcagctattcatcaacgggttcaacgcatgattgatatgaatgtgatcgttggctcagggtatcacatcaatcctaaaatattggggtataatacatgtacctatatcggcgtgaaattggagcgtggatctatgtacaaggatgttgtcccggaattcgagaaaatacccgaagtggtagaatgccatttcactacgggtccgtatacgatgctgatcaagctgtatgcccgtgataacgagcacttgatggaacttttgaactctaagattcaggagataccgggtgttacggctacagagaccttgatttctttacgccaaagtgttaaacgtgagatccctatttgtaatatcaatgaataagacgaagaattatacatgagcccggcctattccagtgccgggcttttttgtttattcggcggtatcatctatctttgtaattcgtaattgtgtgaggttctatgagtaaatatataggaatattcgttttcgtattcagtttgttttctttgggagtacatgccggggaaagttttcgttttcgggtgtatttgaaagataaaggggattccggttatacgctggataacccggaggaatatctttccaaggagtctgtcgagcgacggaaccggcaaggtatatcggtgtcggaatcggatttgccgatcgctcaagcttatctggataccttgtccgccaatggaggaaaaccggtgctggagagtaaatggttctctacggtcgtggtgtccagtccggatagcttggtcgctgagcgtctctcgcgcctcccgatcgtggattccgtgaaatgggtctggaaaggtgacgaggaaatcgatattcctagggaggagaaagatacgacacggtttatgccaatagataaacctgagaaatcgccttacggttatgccgaggagcagatcaagatgctgaacggtatcaaattgcatgaggcaggctttaagggtgagggtatgcgtgtggccgtggtcgatgccggtttcatgaacgtggatcggatcagcatatttgattccttgcggttattaggaacgcataacgtggttttccccggtcgaagtgttttcatcggggatgatcatgggacgaaggtcttatcttgcttggccgctgatgcgccgggcttgatggtcggtacggctccccaagccgaatattggctgataaagagcgaggatagccgttcggagtttcccatcgaggaggattattggacggcagctatggaatttgccgatagcgtgggagtggatgtggtctcttcttcgttggggtatttctcttttgatgtagaggccctgaactatcatcaagatcaattggacgggaggacttccttgatcagtcgtgccgctaagatggcttcatcaaaagggatcttgttgtttagtagcgccggcaacgaggggggcggtagctggggaaagataacctttccagcggatgccccggatatattgacagtgggcgctatcacggatcgtaagaagaaaagtaatttcagttctgtcggctttacggcggattaccgggtgaagccggatgtggttgccttgggtacgggctgttgcgtgatagatcctacggggaatatccgttacgcgaacggtacctctttcgctacgccgatcttagcggggttgggtgtttgtctatggcaagcgtttcccagtctgacgaataaggatataatctctcttttgcagcgtttcggcagtaagtttgagcaaccggacgctgagttgggatatggcatcccggatgtgtacaaagcttataaacaggagcgtaaatatgcggccgaatctaaataacttatcgggtgagaaagaggctctatctttgttagagctgaatacccgcatacggggtgcgttgtcgagggctttcccggagacttgctgggtgcgtgcggagatgagcgatgtgcgggtgaatacttcttccggacattgttatctggagtttgtggagaagaatgcgcagaccgggcaattggtggccaaggtacgagggtctatctgggcgaagacatttcgtatgttgaaaccttatttcgagatggagaccggtcagatgttcgcttccggcttgaaagtgttggtgaaggtgtctgttgagttccatgagttatatggattgagccttacggtgcttgatatcgatccggcttatacgttgggggatatggtgcgtaagcgtatggagattatccgccaattgcaggaggaaggggtctttacgctgaataaggaattgccttttccgctacttcctaggagaatcgctatcattacttctccgacggctgccggctacgaggattttatgaatcagttgacacggaataaaggaggttatccgttctataccaaattattccccgccttgatgcaaggagaacggacggaggcttctgtaatagcggctttagaccggatttatcaacatcaagatctttttgatgtggtcgtgattatccgtgggggtggggctacctcggacttgaatagcttcgattcttatctgttggcggcgaattgcgctcaattccctttaccgattatcacgggtatcgggcacgaacgggatgatacggtcgtagatttggtggcgcatacccggatgaagacaccgaccgctgtcgctgagttccttatttctcgaatggatagcgtaggtgaggagttggagaatttgtgtcaagacgtgagtttattggctatggatattctatcccgccagaaaaactatttgcaattggtcgctacccgtttcccctctatcgtgacaagccggatcgagcggaatcgttcgggactgcaaacaatcgcgagtggtttacctgcgatggcatcgggcttgttatcacgccgccagtcggtgcttgagaatacggaacttcgcttgcgaaacggtattacctctaaactctccgaggatgtgcgttttatccagcttacggaacagtttatcaagatggcttctcctgattatatcttaaagcgaggctatagcttagccttgaaagatggcaagattatcaaacatgcctctgatttgcgagccggcgaagaactgacgactcgcttcatcgatggtgaaataaaaagtattatcaaaccatagagggtggttttataaccgtccgataaatacataattaatatggcgaaaaaagaagaaacatataacgaggcgatcgagaaacttcgtaagatcgtggctgagatcgagaatggagacttagatgtcgatatcctgtccgagaaggtaaaagaagctacccgtctgatcaagctctgcaaggagaagctgtataaagtggatgaggaagttaaaaaagttttggaggaattggattgatggataagtacgtcttgatcgttgccgggggtaaagggcttcgtatgggtggagatctgccgaagcagtttattcctatgcgggggaaacctcttttgatgcataccttagaggcttttcatcgttgggatgcttccgcacgtataatccttgtgcttccggaggatcatcagccgtattggaatatgctttgcaaggaaatcggctgcaaggtcccgcatgcgatcgtgaaagggggagatactcgcttcttctcggttaagaatgggttggattggcttttggcggagaggcgtcggaagggggaggaggatagcggtctgagtttggtcgctgtgcacgatggcgttcgtcctttcgtctctccggaggttgttgaggcctgctttgataaagcggctgtcacgggagccgttatcccggttgttccgatgattgattccctgcgtgagacagatgaaaaagggagccatccggtggaccgttcccgctatatggctgtacaaaccccgcaagtcttccttctggaattattgacaaaagcctatgagcaaccttattcgtctttatttacggacgacgcttccgtggtggaggcgatggggcatgcgattgatacggttcccggtgatcgtgagaatatcaagattaccacgccctttgatttgttaatagcggaagcgatgtttgctcggtaaaccctaaaaactcatagacgttatgctggaccttgataagcgatcgattacgtacttgccgggagtaggacccaagaaggcggatatcctgcaaaaggaagcggggatatcgtcgtatgaggacttgctcttttattttccttataaatatatagatcgcagccggttttataaagtagctgagatcagcgggaatatgccttatatccagttgaaaggccagattctctatttcgatacgctaggcgaggggcggagtaaacggctggttggtaagttctcggatggtacgggcacgatcgatttggtctggttcaagggcttgaattatgtgacggataagtatcgtcccaatactgagtatatagttttcggaaagcctacggagttcgggcatacctataacataccgcatccggatatcgactcaatggagcaagctgatcaagtggcgaatggcttgactcctttctataatacctcggagaaaatgaagaaatctttcttgaattcccgggcgatccagaacctgcaatatacgttgttaagctggctgaactgggaacttccggagacgctttcccccgacgtattgaaacggatccatatgatgtctatgacagaggcgatgcggaatatccatttcccggaatctgccgctaagttgcgtgatgcccagttacgtttgaagtttgacgagcttttcttcatacaattaaatatattacgtactgctagtgttcggaaactgaagctaaaagggatcatattcccgacggtcggccattatttcaatacgttctataaagagtatcttccttttgagttgacgaacgcccagaagcgggtagtccgtgagatccggatcgatatgggtagcgggcggcaaatgaatcgcctgctgcaaggtgatgtggggagtggcaagactttggtaggcttattgtctatgctattggcgatagataatcattgccaagcttgtatgatggctcctaccgagatcttggcgacccagcattatgcgacgatcatgggattcctgaaagatatggacgtgaaggtcgctcttttgactggatctaccaagaagaaggagcgggataagatattaccggctattgccagcggtgagatccagatcgtgatcgggacgcatgcgttgattgaggagacggtggttttctcttcgttgggattagcgattatcgatgagcagcaccgttttggtgtggagcaacgctcacgcctttggatgaagaacgctatcgtgccgcatgtgctggtgatgacggctaccccgattccccgtactttggcgatgactttgtatggggatctggatgtatcggtgatcgatgagttacctccgggacgtaaaccgatacaaacgcttcatcgctatgataataaaaaggcgcaattgtatgagttccttcggaaagagatacaaaaggggcgtcaggtttatgtggtatatccgttgattgaaggaaatgagaaactggattataaagacttggaggccggttttgagacgttcaaggaggttttccctgaatataaggtatgtatggtacatggccgtatgaaagcggcggataaggataccgagatgcagaagtttatctccggcgaggcgcaaatcttgatggctactacggttatagaggttggcgtgaacgtgccgaacgcatccgtcatggtgatcgagagtgctgaacgtttcggcctctctcaacttcatcagcttcgtggccgggtaggacgtggtgctgaacaatcctattgtatcttggtctcatcctataaactaagtaatgatactcgtaagcgattggagattatggtgaacagtacgaatggctttgagatcgctgaggcggatctccgtctccggggacatggagatttggaaggtacccgacaaagtggcgaggggatagaccttaaaatagcggacttggcggccgatggacaaatacttcagtatgcgcgggatatcgctcaaggagttcttgacgaagaccccgaattattgtccgaacagcaccggatattgagcgaaaggctcaaaactctgttcacaaggaagataaattggggaatgattagctaatatgttgtgaaacatattgttctgtaagtctttgatatttagtttgtttattcgcttgttttgcttttattcaaagtcattgcagaaatttttcgttaatcaattttgtcggcttattcaaatttccgaactttgacaagttgacaatcaggcagagatgtcgggtattgccgttttatcctgaattataagaatgaaagttatcaaaaaatgagtataaggacatttctattcatttgttgtgccgctgtgatggtatcgactgctaatgcggagaacccggtgaaaccggaaactccggagactcccaatcatccaacccacaaacttatggacaagcgtgtatctgagttaatggctgaccgtgttggctttaagaaagatatggctttgaaggagcttgcggagattaatgaaaaagcggagttggaggcgagagagaacttgatgttccctgccgatgaattatatggcgaatggacaaatgaatgggtgaatcctttccggggtaaaaaggtagatatgccggattcttgcgtaatcgattgttctacttttgtcttgcctatggactctatgacaagggtcacttcaaagtatggtcctcgccgtagacggatgcataaggggatagacttgaaagtgcaaattggagatacgatccgtgcggcgtttgacggcaaggtgcgtatcaagaatttcgagcgtaggggatatggctattatcttgtgattcgccatccgaatggtttagagactgtatatggtcatttatctaaattcttagtaggtgtgaacgatatcgtacgggctggagatccgatcgctttagggggaaatacaggacgctctacgggatctcatttgcattttgagactcgttttcttggacaggctattaacccggctgatattattgacttcgagaactcaatacctcatcaggatcaatatgtgtttcgtaacgtcaagattaacggacgtaagagcaatatctatacatcttccaatagtcagatggtgtaccatcgtgtaaaatccggtgataccttaggtaaaatcgcacgtatatatggtacgacagtgaatgagctttgtcgtttaaatggattgaaatctacttctatgttacgtatcggccagtccattcgttgtagtgccggtgtggaaaccgcggctaaagcgactccaaaagctcaaactcaaaagaaatcgactgcttccgcatcttctaagaaaatcacggtacaggcaagttcttccgctaccgcttctttaggagaagacacgaatacaatgaatgatgtggaggctacttcggtttatcatcgtattaaatccggtgatacgcttggcgctatcgctaaaagatacggtacttctgttagtaaactctgcgaattgaacggtatcacaaagactaccgtgttgcgtttaggacgctcattacgctgttcataacgatatataagatgtaaggaaacgaaaaggagccgcttataaagtggctcctttttgttgtaacctcttttcatttatcttattagcttttgttgtcttgaattttcgagaacatctacgtcttttttcctatattcgcgggtataatctaggatagtatgccaaatacaaaggaacaattcgagcaagtgatctccctgtgccgggagttgttcgagaagaagttgaaagattacgggccgtcgtggaggatcatgcgcccccagtcggttaccgatcagatatttatcaaggcgaaccgtatccgtagcttggagatcaaggggacgagcatggtggacgagggaatccgtccggagtttatcgctatcgttaattatggtgtgatcggcttggtccaattggcgttgggatttgcggatacgaccgatatcacgatagagaaagccttggaattatacgataaatacattgcggagacgaaggaactgatgtacgccaagaatcatgattatgatgaggcgtggcgcagcatgcgtatcagctcgtatacggatcttattttgatgaagatttatcggactaagcaaatcgagagtcatggaggcaagacgctcgtttctgagggagtggacgccaactacatggatatgattaattatgccctcttcggtttgatcaagctggagtttggtgaggagtgagctacatggaatataaggaaaccgtaaagaaagtgatcgcagaggtctgccgcctgttactgggagtagtctttatcttctccgggacggtgaaggctgtcgatcccatgggaggagccattaagattggcgactatctgacttcctttgggctggataagctgcaaccttttacggtattgatctccttcaacttgtccgctctggaattcatgctgggtgtctgtatgctattaggggtgtaccggcggtatacgaccttcttgaccttgctgatgatgtctttcatgacgccgctgacgctgtatctggcgatcttcaatcccgtatcggattgcggttgcttcggggatgccttggtgatcagtaattggcagaccttctataagaatgtcgtacttttggccgccgctatttacgtgttcatccataatcagcggcttttacaaggctatacctaccatgtctactggttcgtggctttgtggtcatatgtcttcgctatcggtttcgcttaccggaattataatcatttgccgatcttggatttccgtccctataagttgggtgcgaatatccctgccttgatgtcgataccggaaggtgcgcccgaggatgaatatgcgtattcttttatttacgagagggatggcgtacagaaagaattttctttggagaacgccccggccgatgatagcacgtggactttcgtggattcaaagaccaagctgatcaaacaaggatacgttccccccgttaccacatttcatatttataatgagaatgacgcagacgtgactgatgagttgctgaacgacccgaaaggtctctttcttttgatcgccccccgtctggagaatgcggatgatgagcgtattgacgagatcaacaatgtatacgattacgccttggagaacggtttgggcttttattgcgtgacgggttcttccgccgaggctatcgctacatggagtgataataccggtgccgagtatccgtttcttatggccgatgatgtccttttgaaaacgatcatccgctccaacccgggattggtcttgctgaagaaaggtacgatcttgatgaagtggcattacaacgatattccacaggaagaagacctgaaaacgatcgtaaacggctatctggaaggaaataccgactggaaagcgaaagaagatgcccggctaataaccaacctattaagttttaccgtacctttgttgctggtttggggatacgatgccttgcgcaatcgccgtcgccggaaaggaaaagaatctgaatagagatttatttgtattacatatttaaattattaagttatgagaaagaatattgttgcaggaaactggaaaatgaacactactcttgctgaaggtcttgctttggctaaaggtttggacgaggctttgaagggtaagactccgaattgcgatgtgatcatcggtactccgttcactcacttggcaagcgttgctgccgctatcgatacaaacaagatcggtgttgccgctgagaactgcgctgacaaggaaaaaggtgcttatacaggtgaggtttctgccgctatggtagcttctactggtgcgaaatatgtgatcttaggccactctgagagacgtgcttattatcatgagactccggaaatcttgaagacgaaggttgagttggctttggctaacggtttgactccgatcttctgcatcggtgaggttttggaagagagagaagccggtaagcacttcgaggtagtagacgctcagatcgctggttctttgttcgacctttccgctgaggatttcggtaagatcatcttggcttacgagccggtatgggctatcggcacgggtaagactgcttccgctgagcaagctgaggagatccacgctcacatccgcgctactttggccgctaaatatggcaatgaggtagctgataactgcacgatcctttacggtggtagctgcaacgccggtaacgcgaaggaattgttcgctaaaccgaacgtagacggtggtttgatcggtggcgcttctttgtccgttgacaaattcatgccgattatcgaggctttttaattaattcataataagaaggcatcttttccctcttcagaggggaaagatacccttttaatagtatatcgatgaaaagaattccttgtatcttattgctatttgcctttttgatggccggtacttcatctttattcgctcagacggcgttggaaggtgagcgttcgaccatattcgacgcattgcggagatccggtttgggaaaaggcgaggtcgttatcaatcaatccgccgctattggcgagatggtgggcgagcgtatgcgtggagcgaacgtggagacgaccgatagccttaccttcttgaaggtacaagggtatcgtacgcaggtattttccggtaacaaccaacgggtctcgaaagacgaggcttttcgtaaggagaaggagatcaaggagctttttcccgaggtcccgacctatgtcacttacaacgccccgttctggaaattgcgtgtaggggatttccgctcacatgaggaggcttatcatatgatgcgcctgttgatgggcgctttcccgaaatacggaaaggaaatgtatatcgtacgagaagagataaaaattcccctaaattaaagatgatgtcagaagtaaacgaagagacgctatgtgcccgggaagctttggccggccattataaggaagtattgggtttgctgggtgaggacgtggagcgtgagggtctgcttaaaacgccggaacgtgtagcgaaagcgatgcagtttttaaccaagggataccatgaggatccggaggcggtactccgttccgccatgtttcaggaagaggattacaaacagatggttatcgtgaaagatatcgatttcttctccctttgtgagcatcatatgttgcctttctttggcaaggcccacgtggcttatatccccaagaaatatattacgggcttaagcaagatccctagggtagtggatatcttcgcccgccgcctccagatacaggagcgtatgacgatgcagatcaaggattgcatccagaggaccttggacccgttgggcgtgatggtcgtgatcgaggcgcagcatatgtgtatgcagatgcgtggcgtggagaaacaaaattccttgacgactacctctgatttcacaggctttttccaacaagctaagacgcgcgaggagtttatgaatctgatcaagcataaccgctgatgacttaatacaagtcggcatgcgtaccagtatcggtcatgatcaagaccagttcggtatcgttttgttgccatattaagagccagtcgcttttaatatggcattcccataggccctcaaatttaccgcttagtttatgggggcgatattggttggggagcgtaccggtttcttgaagaatatcgataaccctttgaagtagatgaagttctaatccccttttcttacacgttttaagatctttcttaaaattcgtggtgtattccaatcggtacatgggtcaaccaaggatttgttgaaacatatcttctgcgtttttcgctttgtgtgttcttccggccttgatatcctccagtcccttctctataccggacttcttcctgccgatattccaaccgaatttcttggccagttctttgagcaaggccatgtctacctccggtaaggtaatttctactttcttgactgtcacttccatatcttgggttgtttatagattgtatgtgacaaaaatacgtttttttattgaattgataatcatctttgagagatttcgagaaagacgatcgaaggatatgacaatttgttaggattgacaatttgtaatcggaagtcccggagaatcgatttttccgggctaaggtacgtcttgtgcttgaatttgaaaaaataaatcagcaatcggttcattgatagagcaatgctgaaaaatggccttttgttctagcgaaaataattcatcgtaattcatatccgatggagcaaaaggagggaaaaacggtgttacgatagggctataaggaggtaagaatgcccattcacgactacttacaaccctatttgcgactgcttataatgcccaatggcactactggcgttgcttaacgcgaccgtatgtgtaggcttttgtcgcctaatgtgtatcgaaaacggtctttttcattggaaaagcactgtttattgttatctcccctcctttatcttgtgattcctgtggaaatgagatgttatggaaaagctctaatactactcaaaaagacagaaaagcctcttcgtggatgactttatggaaatgagaattttgcttgatcaacagctggaaaaagcgtttagaagtgaataactaatcacttctaaagccgttagttattcactgggtatactcgttagttattcactcgacaagccgcaagttattcacttcagaaggcaaaagtaggagattttacctttcatcccccggatacttccgttggtcacaataatttgattggatattcctgctgatgtaattttgatataaaaacgacatgagcaggaatctttttataatagttctattgataattacccctttttgtggttggggacaggtcgatacgatagcggaccagaagttacaggaggtggtgataatggctaagctccctacggtagagatgaaaccggggaagatgacttataggctggatgcctctatcacccaaagccaagggaatgtctacgacgtgttgaccagtttgccgggagtcgtgatacaaaacgatggcactattttcttgaatggtcaaaacggagcgaatatcttgatggatggtaagccgacctatttattggggcaagatcttgtcaacctcttaaaatcgactcctgcctccattacagataaaatcgatttgattacgcagccatcggcacgttacgacgctagtggaaactccggtattatcgatatacgtacgaagaagatattgcgaaggggaatgaacctttcggtaaatggtagttatgaccaaggtaaatatggggaaggtttcgcttctactaccttgaatctgcggacgaataagttcaacttctatctctcttattcctattcccggaagaatgattacgatgatttgtatgtggagagaagctatctggaaggttggcggccggaaggggagaccgggcagatgacgcaatcttcctatcgaacttggaagaataagtcaaactattatcgtttcgggatcgattatcaaatgtcggaaaagactacgatagggctttccacggatggaaatctggcgggtagcaaggttgagggagacatgaactcatccattcctaagcgatctccgcaaaccggaggtttgcttcgtaccttgaacgaccagaatcgttcgcgggataattttacggctgttttaagtttaacacatacctttaactccgatggcggggtcttggatgcctctatggactacttgcgttatcgatacgaggaagatcaatatttgaatagccaagataccttgtttggggatatgggtggaggaatccatttatactccggacaagcgaatctggtgtggcctttctcgaaatccttcacgttccatgcgggcgccaagacctctttcgtctctatcgataataacgctgattataatcggctacaaggcgactcttggcagtcggaccatgacttgagttgtgattttcagtatgacgagaatataaacgcaggctatatacagcttgacgccaaattctcttcggtaagtctggaggcaggtcttcgtctggagaatacccgtatagagggcgaacagtcgggtaacgcttatcaaagagactcctcctttaccaatcattatacacatttattccctacgctttctgttcagtatgccttgaggaatgggaatagtctgtcgcttacttatggcaaacggattgtccgtccgaattaccgggacctgaatccgtttgtatatatccacgatgagtatacgtatgataaaggtaacaccttattacgcccggaattatccgataatctggaactggcctatatacatggcgatttattccgggtggggcttgctttcaattatacgaaggatgtaattatcaagagctatttggatcaagggaactatgttgtttatgtctcaccggaaaatctctcttcccgcgtcagcgtaggtcctcggctcagtacctcccagttaccgctaacctcattttggaacgtgaacgtcagcgcatcctggatctataaccggtatcgtttgccggagaattatcaagtaaaggtgaatgagagatggacaccgaatatcgggatctcgaatcagtttaactttgcccggacttggagcgctgaacttatcggtttctataatgggaaaatggcggcgggacaagctacgatctatccgttatggcaaataaatgtcggtatccagaagaagatatggaaaggccggggaacgatccagttattcgcacgggatattttccattcgaatgtatcgagaatgagtgtgatgactcctacccaacatgcctttataaaagaacggatgagccggacggtagtcggtatctctttgacctatcgtataaatcgtggtttggaggtgaaagaatctcaccggaagcatagcgtagatgaaagtaaaagaataaatttgtgaaacctctagacaaatggtttatgaaaaagatatataagtgggtatatgccatgatttttgcggtctctttgtattcttgtatccgctgggtaacggattatacgaaagaaggacactattggacacagtccttggggaatagtatcttagaaatcgtgatccttgcttttgtctcttatttgttttttatttatttcagatggcagatcgagaagagccgaagagcgaaagaaccgaatagatggaaatttgtttggagatcgtatggaatgcctttcttattgattatattgggtgtgaatgctacgttggcaataacccgtatatttaccggtgatgctttccatatggacgatataataatcgcgaacgtgatagggtgtttgtttgcgtttatggtctataatgttcagcgagctcaagtattggataaagattacgccgagcagcgtatccaactggaaaagatcaagaatgatcaattacagacggaattgaagttcttgaaatcccaatatcatcctcacttcttgtttaatgcgctcaataccgtttatttccagattgatgaaagtaacaaggcgcctcgtcgcacgttagagatgatatccgaactcttgcgttaccaactgtatggcggtaatcagaaggtcagtatcctacaagaaattgattatttgaaaacttatatagctttgcgtaagcttcgtatgagtgaacgcctgcggttgcgtgtagagtttccgcccgaattgaatgaactgaatatttatccgttactcttcctcccgttggtagagaacgcttttaaatacgtaggtggcgattatcaattggatattatcatgaaatgggaaaataaccggatcagtttgtttatacgaaactccatccccgagctttcagcggaggacgaagcgttgcgtaaatcggtggatgaacggcaacgtaaaggcatcggtctggtaaatttacgccgccgattatctttgttgtatcccaataagcaccgtttggaaacccggaaagaagagactgagttcgtagcggaattaatgattgaaatagaagatatatgacaataacctgcgtgataacagatgatgagccgatggcccgtaaaggattgcaatcgtatgtggagcgagtggattttctctccttgaccggtgtatgtgaggacgctatccaattaaataccctgttgaaaactcagcagccggatttacttttgttagatatcgagatgccttatctttccggtttggatttattggcgaccttaaaccagcctcccaaagtgatcgttacttccgcttatgagcaatatgccttgaaagggtatgagctggatgtcgtggattatttgctgaagcctatttcctttgagcgtttcttaaaaggcgtgaataaggtgcacgacctgttggctcgggagaatacgccggatgcggatgcctcgttcttcgtgaaaagcgagaagcaaatgcgtaagatctacctaagagatatcttatttgtagaggcgttggaaaattatgttagtatctatactacttccggtagagtattgacccattcaaccttgaagcggatcggggaatccctacccgatgatcaatttctccaaacgcataaatcgtatataattaatgcggatcgtgtcgatttggtagaagggaatagattacgtatcgaatcctatcaaatcccgatcgcccgtaatctcagagatgttgtatttaagcgtatccttaagaatacgttgtaattatatgactgtagctaggtcatagagatgcggcacatgccgcgtctctacaactgggtattttgttatttgaataacattggggcgaattttgtgaggtagatgcgccagtttttccagatatggccgccgtcgctctcgtagtattcgtatttgtagccgttatcgtctagtttcttgcgatagtctacgttgtttttgtataagaagtcggtcttgccgatagcgatccagtataatttcggatgcttgccgaattgtactttcagcttctcatccatattctggtagatgggagattcggagccttcacgggggaggatagcggcagagaataatcccacgtaatcgaacatatcaggatattgcttagatatatgcaaagaatggaaaccgcccatggaaagtccggctatcgcacggctggatttctttttttccacacggtaattgctctcgataaacttaatgacatccgggaagctgctttccatgctaccctccatggttttaggtagttgcatattcggcttaactaaacctaggctggattctcccggagcggcctcttgatccgcgtttccgtttgtcataaccacgatcatcggtttagccttgccttgggcgattaggttatccatgatctgggccgtacgtcctaaggcgatccaagcttcctcgtcgccacccatgccatgtaagaggtagaataccggatattttttgccacttgtctcatagccagccggcgtataaacggtaatacggcgagtctttcccaatgtcgggctctcataccaacggcgggcgaccgttccgtgaggaacatcattaacgctgtataaatcaccctgtccacccttaatgataaagatattcgtaacggatgccacgtcacggttcagatagacattgttcggatctgtagtctttaatccgtcgacaataaaggagtagctatataattcggagggaagaggttccggtgtggtatattcccaaacgccttctttaccttcctttaaatcaacggtaccgggtatatccactaaaccgaactgagtctccatcttctgtgtgggaaggaaatctcctgttacctgcaccttgatcgctttgggagccatgaaccggaaggttacggtgttatccggatgaatctccggagagatgatgttctgactaccccaaagggcttgttgggcgaacgtgatcacgctgatcagcatgaatacggccaagaatgataatcttttcataatgataaatttattaatggtattactaaggtctaaagatttttacaaatgtaatgaataatctgttacatgagcaataaataggctcgataatgtgtgtctttcgtgacggggcataatgagaggtagccttcttgaattcttccattcgcaaggcgaagtggataagtctcagacatgaggcggtgtttctcgagagcttctccggcttccttctcgtaagaaacccggtaatcgccaacagccctaggcgctacataatgctggaatagacgtaaagcgaccattcccatcgtgtatcgcatattgatctcaatgcagggatgaatagcgaaagatccgtccttttgtctatagaccagcatgtccacacctatacagcctgcgtaagtagatccgtacacttcttgtaatacagtgcgtaccgcctcttggatgcgggaataggtctcttcgcccgtgaatcgggtgatgcgggagagcatggtggattgttcctctaggatgttgcctgtataggagcctcgctcctcggtattgaaaacggataatccctcgtaacggacagtaccttgcccgtcggaataaaattccatggcgaaatcctgtactttgtctaatccgctttcgatactgatcattccttgtttgttgaatgcgccctctatccagtttttcgtttttgtatccggttttcgtttctctacccatagcaatccccgtccggaagaggaatagggtgtttttaatacgaagggagcgttgcataagatcatgtatctctccacctcccggattttcgtgcagaaacgaggcgctaccggaatagggagatcgggtaggagggcctgtatcttttccagacattccgccgccgtttgcctaccggtaaggcgaaaataatcctctttccaagtcgggacggatagccggacttttgccttgtccctcaactgctcgaataaatgaagactatgcggggaaagtccccacggggccgcgtccataggagagaggtagggagcgtttttcgccagcatcgcttttgttacaggtataggagccgggtgtaggtctttgggcaaatgggcgaaaaacggaggggttgccttactatcttccagatagacaaaatcatcctcttccgcataccaaaccggcagcagtgccaagtctttttgcattttacggacatttgtcggtgccgtgtagttctgtgtccctaaaagtacggccgtctcgtggccgggattgaaataatgtatccgtgacataaaagcgtaaaaacaacaaagccgtctttttaaaggacggctttgctcgggtttatgagattgttattccagattctcgtcgatggcatcgatcttcttgaccgttaaagccatatcctctttcagcttttcgatcttgcgttccatttctttcagtaaaccgccgccgcccttggaggaaatgcttaggaagccgatgttgttttcgtaagtctgaagctcgttcttcatgcgctcgtacatacgcatcaacttatcacgttcgctgaacaaacggcctttacctctttcgccgctggtcatctcgtttaggttgttgcggaacgactgcatcttgcgatcgttctggtctaccttcaagcgatcgaattgttggtcaaccgcctcgtgatattccttgtagatcttatctttctccttgaacggtacgaaaccgatcgtgttccattccgccatataagacttcaaggttgcgatagcctcatcatgtccaaggctctcgtccatgcccttgatcttagcgatcagctctttcttagcggccaagttggtctgctctatgctcttttgggaaacaacgttcttattcttttgctcgaagaaataatcacaagccgagataaaacgtttccagacagcgtcggaatgcttacgggctaccggtccgatcgtcttccattctttctgcaaagcgatcattttatccgtcgtatccttccagtcagtactatccttcaaagcctcggctttctcacataacgcacgtttagcgtcgaggtttttctccatatcgctcttgatcgccttgtagaactcgcttttcttctcgaagtagacatcgcaagcggcacggaaacgttcgaatatctttacattatattttttcggagcgaaaccaatcgtcttccatttctcttgcaagccgattacctccttattcttttcttcccaatccttaaacgatttcaacgcactgaaatcaatcgcctcgatttgttcgcaaatcacggtcttcgcatccagattctcctgctctttcgctttcagtttctcgaagtgctcttggtgacgcttattgatcacggttgaggcagctttgaagcgagcccataaatcctcacgcaactctttcgccaccggcccgatctcacgccattgctggtgcagcttctgaagctggtggaaagcggagataacatccggctcgttacctagtttctctacggtttcgcacaaggcggtcttcaattccagattcttcttgaagtcgtaatcacggaactgattgtttatcttgataatatcatagaatttctcggtgtagatctgatagtttttccaaagctcgttcacgtgctcttggggaacggccttcacctctttccatctttgttggatgtccttgaaagagttgtataatttattgaaatcatcttggctttcgcaaagctctttcaactggtcgatcaactgcaatttcaaagcgtagttagcggcctttacacgctcttcctcggcgaggatagcggctcttttctctttataagaagtgagcaaatccttgatcttgttctcggtttcgtcagcgggagctgtaaaatccttttcttcgccaccatcagcgatgaattccttcttgagctcttccacctcgttacgacggatcttgtagtaagcctgtttcaaagcctctacttctccacgggaagtctctacggaagtctcaacaagttcggttaacttagcgagaatttcttctttggttaatttacctgcggcaatagcagcgtccgcctccgctgtatcgttggcttcaacgtctgcggtagcatcgatttccggcgtctcaaccggttttttagtttcttccaatttcccggcttcttccggcaaattagtctcaagagtgtccttcatatacaatcgcttttaagaaaaggataaatacattcctatatcaagtcacaaattaaactaaatatttttggattacagcatttcggggaaattatttatctaaaaagtcattttggatactaatagatgttaaggttggcctatttctcttgattccggttgtagagacggggcatgccccgtctctacaccgtctacttatactatttaatcttatttatcccaagaaggaaatcaatacgccggcagctaccgccgagccgatcactcccgatatattactagccatgcaatattgcaagacatggttcttcggatcatattgcaacgcgatctcattcgccacacgagaggccattggcacggcgcttaaacctgtggctccgataagcggattgattttcttcttagtgaacaaattgaaaatcttaacgaagaagatacctccggcgatagacaaggcgaatgccaagaaaccgccgattacgataccgattgttgttaggttcaagaacgcttccgtggtcatggttgccccgacggataatccgaggaagatcgtggctgcgttcatgatactgttggaagcggcatcgaacagacggaacgtattggttccgatctcttttacaagattaccgaacatcaacataccgatcaaaggaacggagctgggaacaaacagggcgactacggtagttaccacgatcgggaagataatcttcaatacacgcaaattcttgatctccatgttagaagggtatttcttctcttgttccttcatgttgatctgtaattctttcttagaacacagtagcttaacgaccaacgggatgataaccggtaccaaagccatgtaagaataagcggcgatagcgatcgggcctagcaaatgcggagccaatttaatggtcgtgaagatagccgtcgggccatcggcgccaccgataatacctaaagacgctgcctcttttggtgtgaatcccatcaagatcgctaccaaaagcaccgtgaagattcccaattgagccgcggcgccgaaaatggataggcgaaggttacggagcatcggtccgaagtcggtcaacgcaccgacacccatgaagataatcggcggcaagaagcccgtcttgatcaacatataatagatgaagttcatcaagccaagttcgtgtgcgatatcatgcagcggcatttcccagatgtttctcatcacgccgtgtacattaaccaacccattctcatccgcttgaatcactcccatatcgcctccggggaaattggcgagcaatacgccgaacgcgataggcacgagcaatagcggctcgtattgtttcttgataccgaggtagagcaatacgaacgctatggcatacatgatcaagaactgcggttcagcaatgatattgctgaacgcagtcatctcatataagttttgaaatatctcgttcattattgaatcgtcattaatacatcatcctcagatacggcatcaccggaagacaggcagatcgccgtgatcgttcccccgaactcggcacgtacggcattgtatgttttcatggcttccacgtagcaaaggacatccccttctttcactacgtcgcccaccttcaccggggtatcggaagcgttctttactaggaagaatttaccttccagcggagaaagcacctctttcccagcgcctgcgggaacgtttgttacctctggggctgtcggggcgggagccactgtcggtttaacttccggagttgagctgttggtatcaccaaaagcgacggtcacatggtaagcctgtccgtttacatctacggtcatgacttgcggagtcgtcggcatcgttaatgcagcggcaggtgccggagccggtgcggcaggagtggcgggtaccgtcggtttaccggcgttcgctttctctgccttacgttttgccacgtctgccttaaactcgaccttggcctttccagagcgatatgcctcgtattgagcggggtgcatggcgtattcgaagagttcttcctcgtcctcgccaacttcccattgtttctcgttcatcaacttgcggtacttatccaacgcgtccgggtaattgtcttgaggattaccttcgaagaacttacgtccctcggcttgcgccttctcgataatctcgggagccaacggacctgggagtcgtccggcttttccaaggatcatatcccagatatcatcggcgatcatgctccagcgggctttccccttctccatctgcatgacgttcatcaaagctaggttcttcacgtattggctgaatggagttaccaatggaggataaccgacacgtggccatacgtaagctacctcgtcgaacaacttgatcaataactggtcttgagacatcagcggtttgttgttctttatattgctcttgttgatcgtctctaggttcttctcaaggtctgccatcaagctacccatcataccgcccggaagtcccggtccgattagcaaggaattcatcaaccggttcttcgggctgatatacaatcccaagaaatcatccatgaattcttgaaccaaggcacgaaccttcatataagcctccatattgatctcgggcaccttataaccggcgtccttcaacatagcctgtacggtcagcaagtccgcgtgccctgtaccccaagaaagcggctccatacctacgtcgatatagtcgcaacccgcgttacaaacctccatgatggaagctacgttaaagccgggaccggcatggctatgatattggatagggatctctggatatttttccttgatattggctacgatacggcctaatgtgtacggacgtccgataccggccatatccttgatacaaatctcatccgctccgagttcgatcaactcgaatgccatcttggtataatactcaaccgtatgtaccggagaatgcgtgatacacaaggaacattgtgagatcataccggcctcttttgcgtatttaatagatggggcgatattccgtacgtcgttcaggccgcagaacgtgcgggcgatatccgttccttgcgctttctttaccttataaaatagctgacgtacatcgtcgggtaccgggctcatgcgaaggccgtttaacgcacggtccaacatatgcgtctgaatgcctgccgcatggaaaggttttgtccattcacggaccgctttattaggattctcgccgaataataagttgacttgttcaaatcctccgccattcgtttccacccgggcgaaacagcccatctcgataattgccggagcgactctggttagttggtctacggtcgggacatactttccggcggattgccacatgtctctgaagaccaaactgaatttgatttctcttttcatgatattaatatgtattatttatactttctcaattttgataactttcccctgtccacgggtcacggcactgattgccgatacgatggcggctgtctcctgtccggaaaggctaccgatcgcggtggtttgcgttggagtggccgtttgtacccgaacggctgccgctactggtttcttcgctatgatctcttccggcgcgtatttattcaccaagacgataagtcctttccccagatagataacgatcaaaaggatagcaaatacggtggtcattccaactaccattaacaaaagtcctgtctctatattctccatattctatatttgtggctagcttaaaaggtttctacaaaggattgagcaactttcagccaaattaaaaacaatcgcaaaattataaaatactggaaaacgatctgttacattttaattaaaaaaatgaaaataaataagcgaaacggccttttcggtgaatgattgtcagcttgaaaaaacacgtacgtgttttttccgatgcttgtacggctgaaaattcaaatatattaccgtaactttgcggtggaactctaataatgtagaactataataattaaggaataagaccatgggaaatttctttacatctttattctcttcttccaaaccggccgaggcgacggaggataaggcgaagaacgagcagaagaactttgatatcttgaaatacgacggcgtgcgtgcccagaagatgggaaaacttgcttatgcgatcaaatgctttacggaggcgctgaatatacaggaggattttgagacgatgagctatctcgtctccgcttatacgatggcgaacgagctggggaaagccgaggacgtgttgaaccggatggttgagatggagccggatcatatcgctacccgcttgactcgcgttaacttattgtttatgttggataaggatgcggaggtcataaccgattgtttgcacgtgatcgagctagagccttctaatcatgtcgcttatttcatgatggcaaaagcgaagaaagcgacgaatgacgtatttggcgctatcgccgacctaacgagatcgatttccttgaaggaggatttcgccgatgcttatttatcgcgtgcagagattcttttaggactgggacaagctaaagaggcgctgcccgatgtggagaaagcgatcgagatcgtgccggaggaggaaagttcttatttattgagaggacgtattcatatggctttaggggatatcgaggctgcgaattctgatttccagcaggtcctagatctaaatccgtttaatgaggatgcttgtatcttatctggtcagttattgatcgagcaaaagaaatatgacgaggcgatcgctttctttgacgaggcgatcgagacgaatccgtcttttgccaaggcttatagtgagcgtgggcgagccaagaatctgaaaggagataagaccggtgcgttcgaggacttgaagaaatctttggaactgaatccagaaggcgaagaggcccagaagatgaacggacagcattcgaatttcgataatatgtataaagggggaatcttttgatcaaggtaaccacattttcaatcccattggatacctctagttgtagagacgtagcgtactacgtctcatcccttcaaaatggtaacttaaagtaaggacatactacattccaagacaaattccatacaataagtatatgaatgacatggctctgtaagttattggacattagtgtcttaaaaatacgattgtgtttttcgcaaaagacgtacgtgtttttttgaaaagtcgtaaatgtttttcgagaaacacgtacgactttttaccgaatcattcgatagagaacaagagcatacatagaaatatacgataagcctcccttatcactggatcttctcgtatgaaacagtacatcaaaaaatctctggaaacaagtttatattttttctcagcgtaggtatctctatcgaaatgataggattctctatcgtttatttcagcaagcctcaaattgctagttttaccccttaaagttgaaagttccgcctattccctacattaatgtatccatctaattttgtccgtgtaaaaagttcacaagcttgtttttggaaacttagtcccgataggactaaatactttaaacaggcttaagtaaagaggatatacaagaaagtatcaactctttaccctacaaaaaacaggtaaggatgattttcataagttcttctctaaaggggatggatttatataagagattataatataaggatttaataatagggctagattaaatagtcctatcggaactaaaacgatccttatattctaaacaacgaggaataagttaaacgaataaaatatagggacatgaaaataaagacaataatctcaagtatttgcttgatgctattagcagtcgcttgctcgatggaggatgacgtgctgagggacatggagataggagattcgggaaatgttgagatagagatgggagaggccgcttttgttcttaagacttctctttcttctttggagacaaaatccttatctgatgctggaacattacctgcttctatggatgaggcagagattaataattgtacgttgatattttttgagggcacacaagtcagttccataatggaagggttgtttgtgaataaggagaattatatcgttaaaacgaaagacggaacgaaagatgattgggctaaagtgattttaaaagtgaaaaagcctagtccttattccgtgatggtaatcgctaatagctcgaagtcgtttgcgggttgccaatcggaaaataatataaaggatataatacaggatgataaggatgctttggtaaaagttgggaaaatggatatcagttttgatactgactttgctggctatccaacaattgcggaggcattgggaaagcctttagaaataggcacaatacctctttctcaactaacagctcgaatagaacttgcggaatttaatgtttcaggttttcaaggagcatctgttaaagagaaggttactgttacaggagtggatctgttaaatttgaatcctgagagttatacgataaatgagcaaactcataaaaatgcgacttatttgtctgagagtaaaacgtgtaatgtggaggtctataatggggtatcggatcttccgtcaacttattcttttgtagataataagaatctattgtctttttattctttccggaatctggcgaaggcagagagtgatcaagtaaaaatgcaggttcggttcaaaataggaaatagcaatgaggaaagaactacgaggccgtttgtgatcaataaggaaggaaatatcttacatggcgttaaatccggatatgtttatcgcttggttgtcaatatgactattattggagataaggtcgagacagaactgctttgctatacaagagattggttgaataataccatatccattcctatggaagataattgtaaacgggtaaaataaaaatacaagattatgaaaataaggaatatattatcagtgctgtttgttggactgcttttcacgagctgtaactcggaagaagaagttcagcgaggaaatgaggacgggcgggatatctcattctctatgactcttactttgggagaagtgacagcgatgacgaaagctggaggggatatcgctgaagggtatacatattcgacagaggatgaggtaaaagtgaataatgttgtggtcgctatatttaatgaggcgaatggaactgtgggtgagtgcttggagtacaagtctgtagcgtttgacgggggaattcccaattctaccgtaacgattgatggaaaaacattgattgcttataaaattgataatatacaagcaaagacaggtaaggttcgtatcgtagcgattgcgaattcaacgcattatgaggacttggctagattgggaacgactacttatgagaacctgaaaggtttgtcggaaaccgtttcaggtggaacttttgatgcttcaaatttggtaaaggtcggggagttggctgcgtatgacctaaatacggctgtgacaagtatacctgttccgatgacacaattagcggcacgcatcgatatgaagtttacggtagatgaagagccggagactgtgtctacaacagatgatacaaaagtaaccaaccagtggttctatactgtaactaaacttacggtcaagaatatcaatcagaaatcagatttaatattgcttggtcgagataatcaatatgatgatacttactctacggcaaaggatattacattgcaaaatggcgttgcgttacctttttatacctatgagaagttgaacacgacgttaaccccattgtctatatatgtaacgggtgatttacaaaagatacaggtcacgactacctttaatgaggatatgactattcaaaatgtaacgaagggaagtattatagaggaagagaaagatcattcttataaatatgaggattttaatcctacgacagcgcttgaaggatgtacgacaaatggtatcatacatggtaatagatatgagcttacaggtaaaatatccatgaagacacaacgaatcaactttacggtatctacaactccgtgggaaggtgtggaaaagtttgtcgtggatgtggttattgcggatttgaagtatttgttcgtgagggagactaaggtggtgatggcgaatatcactgagtataagatagagtttgcttctagctcgaatattacgattgatcaaccatcttatgcgacttatgaggagtattatttgttaaatggaaaaataacaaagagagatggtacgtattaccctaatagttattattacagttggactaatgataataagcacaaacaagatcaatatcctaagataagcgcagaagcaggaaaacaaggctccattattattacgagtaaattacctgtaaattattttccaaagcaatttgtttttggtgttcataatgcagaggacttgaaagtatcaggaattatcgtagatcaatatccacctcaatatctggaaggaaaagtttcgaaagatgctggtccagcagattctcctgatggggatacaaaccctaatatctttacgataacagtcaaagctgcagggaatctgataattggagatcctagtactataaaaaatggagtccgggtgactaaagacgacgctttctctgcggaattagtatctccaaaatttgtagtagcctcaagatttggtgctgtaagtacaggtacttatacatattccaaagcggtagaacgttgtaaaaaatattgggagaggttagaggatggtacctattatgaggctggcacatggagggttcctactttagctgagttagagtttatgaatacagtacaagacgcttctcctgcggtaaactatttgtttaatacaaacggtacttattggtgtgcaatgccgtattggtattatgactttggggcaaataaacgtaatcagtttactaataatgcctctagtcaaaaagctgacggtattcgttgtgtaagagatttatattaaagatgtttattaatgatttaaatagagatttttatgataaagaaattatatagcctattttccatattactgttgctcgcttcatgtgcgacagaggaaatagaacaaatagaaattcaaccgacagatggatcaatggtttctctttcattctctgtagatgctccgaatgctcttgagattacgaaagcgaccggggatgtggagaaaggtgttgagtccttatatctatatacatttaatgaggatggagagtttatctctccagttgtagaggctgttgtttctggcaatggatatacggcttctatctcaaaagagacccgtaccatccattttgtcgccaatgatggaacgttaaccccttccctagaaagtggaatggcctcgttaggaacagataagcaaatcttttggggaaagagaacttttagtgaaattcctgcgaaaaatataagcaataatctagaagatgctggtaacaacaatgttgaactactacgaaactgggccaaaataacgctgaatctctcatcggaggcagctgtgaaattgaaaaatgtttcttatctcatttataatgaatcacagttggcatctatcagttataaagatgcgggaaagttgaatattccaaatcaagatttttatgcgccccagaatgagccagatgctagtaaatatgcgaagccgggtgaatctgtgtatacttttgaacattataatcaagataagaatgcgacttttgttattattaaggcgcaatttgatggtagcaagacctatacatattataagattgatcttgccgtaaaggatgagaatgataaggtaactcgtgtttatgatgtcgttcgtaattatgcctttaatataacggtcaagagcgtttccagaaaaggagctacgtgggctgaggttatagatgaaaatgtgatagcggataataatatcacggcctcggctattatggaaaagtatccgaatataacttatgatggcgaggccttgaatgttacaaagacgacattcgtttttacgggctcttctaacacattgtcgatgactgcgatatatgcgggaacagggcagttgagtgtggttccgggtgagggaatgtcggatgtcgtagatggtaacttaagttatccttcttggataccttctggcaatcagacgataacgattacagccaatataaagccggctcctgactccggtgagaagatagcgtatttctacgtggtaggaggtaatttgcagcgtaagattaaattggtcttacgtcccccttatgactttatgaatccgagatttgaaaacgtgaagaatggaacaggcacaaatgaaattgctgcaggtcagcaaaaagatgcttatctgaaattctcgataccggaagatattgatgaatccttattccccattgaatataagatatatactaaaaaactgtatgcggtagaacccggtgttcgtttggaaacgaccggagcgagcgattggtactacgtctatacggatcagatatttagtcctgaagagaaggttattcaatttaaaacgaatacagcaaatgatggtgaagatgatgttattttaaaggctgatttattcaatcctgtttctgatttgagttatactagacctgaaaaagttaaagagacgaaaactttctatttgcaatgtcgaagaaatggaagcaatgtgggaagtaatgtaacaatcacttattccatatcaagtggtggaggagcagcaattagaactaatagtagctctagaatagtattggataaagtatccgtgtatgcagatgatgaaataacgtttacacacacatataggggaagtacgtatactgcggaaatgtctgtatctgatttggcgaaaagtagtaccagtaattatgtatttgtgaatatgagataatataatgggttcccatccatcatgtgaatgacggatgcggggagcgtgcagcacacaatggattgaatttgttttacacgtaggctgcacctcctccccggccctttcctcatatagcattcatgctttatcgatgccattcattccgtaaggagatgggtggcatcgctttcttcatttgccgatgacgttaacttacttgccccatgcagttaacttgctttggtctgatatcaaaggttcttgtgtaaaaaaatgcgcaaccctttgtttattaaaaaaaaggctctatctttgcagcccgaataagtatgcgaataataataaataatatagaaagatgaaaagaacattccaaccttccaacagaaaaagaaagaacaagcatggcttccgttcaagaatggctaccgctaatggccgtagagtattagcttctcgtcgtgctaaaggcagagctaaattaacggtatctgacgaatacaacggataattagtcacgttctaaagatttataaagaaagtagaggttttttcctaaaaagcctttactttctttgtttttgtagtattgctctggtggatattggtctatatgccgttttttttctacttttgaaccgcctacaaatacatacgtgaaatgagtaacttttttgtaaaactgataaagaatccgtttgtcatcaatctcttgttggtgatagtcgtgtcgtgcggcgttgtttatggcgtactggcgtggctggattcttatacccgccataatcaagcggtggtcgttccggacgtgaaaggaatgaagctagaggacgccgccgagtttttcgggaataataagctacgctataacgtgatcgattccgtattctcgaaagatgtggctccgggctccatcgtggagttggttcccggtgtcggatcgaaggtgaaagaggggcggatcgtctttgttacgattaacgcgttgacctcccagatggccgtgataccggaggtggaagacttatctttccgtcaggcgtatgccttgctgcgggcccgtggcttctcgtcggtcgagatagagtatgtgccgggcgattataaagatttggcgatgggggtggagttaaacgggcgtaccttgctcaaaggggaacatgtaccgttgaccgctcatctggtattgaaagtaagcagtggcgatccgaatatgcttcccgactcattggctttggatagtattccggtagaaccattggatagtgatatagaaaactggttttaagggaatggacgagtttttggacgatatggatgatgaacaggtagacgacctgttgatgccggaagaagacgaaacatcgtcgagccagatgtatgagcatttccgcttcgtagcggacaaggggcaatccctgctccgggtggataagttcttggtagaccgtatgatgggcgctacccgtaaccgcatccaattggcggctgaggcgggttgcatcttggtgaacgataagccggtgaaaagtaattaccgggtgaaacctttggatgtggtttctatcgtgatggatcgcccacgccgggaactggagattatccccgaagatatccctttgaatatagtatatgaggacgatgatttgctggtggtgaataagccggcaggcttggtcgtacatcccggtcacggtaattatactggtacattggtgaatgccttggcttattatttgaaggatgatccctattatgatccttccgatcctcgtttaggcttggtacaccgtattgataaggatacgtcgggcttattggtggtggctaaacgcccggaggccaagagtaacctgagcctgcagttcttcaacaagacaaccaaacgtaaataccgtgccttggtatggggcatcgttcaagaggatgaggggcgtatcgagggaaatatcggtcgtgaccctcgtgaccgtatgcaaatgaccgtcttcccggaaggcgatcaaggcaagaccgccgtcacccattacaccgtgttggaacgcttgggctacgtgagcttggtggagtgccgtctggagacggggcgcacgcaccagatccgtgtacatatgaaatatatcggtcatacgcttttcaacgatgagcggtatggcggacatgatatcttgaaaggaacaacttttactaaatataaacagttcgtgcaaaactgtttcgctatttgtccacgtcaggccttgcatgctaagacgttggggttcgttcatcctactacgggagaggagatgtttttcgattctgagattccttccgatatgcagcagctgatcgacagatggcgtgtatacgcgaacactaaagaattgtaaaaatgaaaaagaacatcgctatcgtagcagggggagattcctccgagatcgttatttcattaaaaagtgcggacggaatctactcttttattgataaagacaaatataatttatatattgccatcgttaagagggatgagtgggcggttatacttcctagcggggaacatacaccaattgataagaatgattttagcttcaaggagaatggcgtgacgaggcattttgacttcgcttatataacgatacatggtactccgggcgaggacggacgtttgcaaggatatttcgatatgatcggtatgccttactcgtcttgcgggatgctggtgagcgctttgacattcaataaatacgtatgtaatcattacttgaaagactttggtgtaaaaattgccgcgtccattcatttattcaagggagagactattacggacgaagaagtcgtgactcgtttgggtttgcctattttcgtgaaaccaaacgatgggggtagtagttttggcgtgacgaaggtgaaagaggtctccgctatccagcccgctatcgctaaggcgtttggggaaggacgtgaggtgattctcgagcgctttatcgatggaacggaagtgacatgcggttgctataaggtggagggtaaagaggttgtcttccctttgaccgaggtggttacgaataacgaattcttcgatttcgacgcgaagtataacggacaggtggacgagatcactccggcccgtatctccaccgagttgacggagttgatacagcgcgagacatcaaggatctacgatatattgggcgccaaaggactgattcgtgtggattatattattccggcagacggggagcctgtcttactggaaataaacacgacaccgggaatgacggctaccagctttatcccacagcaagtacgtgcggcgggattggatataaaggatgtcatgacagacattattgaagacgaactcaaaaacagaaaaacaaaatgaatagatatggatacagaaacagtttcccctaatttcgacgacatccgtccgctgaacaacagtgaggtgaaggacgcgattgaaaaattggtcgccaatgaggatttcgagcgggctttacgttacataaagccgaatttgaattgggaggaattctcagttgccatgcgtgcttgcaagacgaaggaggagtttaaatctactctggcctatgacgctgtaatgacggtggcgaaaaatactactttctcgcttactatctcagggcgtagccgtctgccgaaagataaggcggcctgtacgtttatctcgaaccatagggatatcgtattggatgcctccttcttgaacgtcatgttatatgatgtggggtatggtatgacgcaggtcgctatcggcgacaatcttttaatccgtccgtggatcgagacgttggtgcgcttgaataacagctttatcgtgaagcgtggcgtttctgttcgtcagatgttggaggtcagcaagacgctttccgcctatatccatcatgcgatcaagaatgtgaacgagtctgtatggatcgcccagcgtgagggacgtgctaaggattcggacgatcgtacgcagggcagcgtattaaaaatgttgagtatcggcggtgataaggataatctgttgttgaatttgatggacttgaatatcgtaccggtcgctatctcctacgagtttgatccttgcgatttcttgaaggcgaaagaattccagatgaagcgggatgatccggattacgtgaaatgtcagcgggatgatttgttgagcatggaaacgggtatcctgaataataagggtcgtgtccacttcacgatcacttccccgatcaatgattccttggctaaactagacaaggatatggagaagaatgagctggtaagcgctatcgcatccgttatcgaccgggagatctataagaactatcgtttctatccttgtaattacgtagcttatgattggctgaacggtactcgccgtttccacgagcattacggaccgaaggataagaagcagttcgaggagtatatacaaggacagttggacaagatcgtccttccgaataaggatgaggcgttcttacgtaagaaactattggagatgtactccaatccgttgaagaactatttgacaactttataagttccaattgattttgatagagaggtgttgtaaaagagcggaagaagccttttacaacacctttttggttaaccgacgtatctacgttcataaatacctgcatgaatgtatgtttcttaacatacgctttcggtgacatattgtaatcccctatttcgtatctttggcatatacggtaagaaacgcttacagtatgctaatcatttaaatcagtagcagtatgaaaccggaagattacatcacccgtgaggagaagtatggtgcccacaactatcatcccctgccggtcgttctcagaagaggcgaaggcgtgttcgtgtgggacgtggaaggaaaacgttattttgatttcttgtccggatattcggcgttaagccaaggacattgccatcctaagatcgtaaaggccctgatggagcaagcggagaggcttacgctcgtgtctcgtgcctttcatgctgatatacttggtgaatacatggaatttacttgcaaattcttcggctatgacaaacttctgccgatgaatacgggagccgaggcggtagagacggccttgaagctttgccgtcggtggggatatcgtcggaaaggggttgccccggaacgtgcgaagatcgtggtttgtagcgagaatttccatggacgtacgattacgattatttccatgagtacggaccctagctcatacgccgatttcggtccttatacacccgggtttataaagataccctataataatgtggatgcgttggccgaggccctgaaagatcctgatgcagtaggcttcttggtggaaccgatccaaggtgaggctggggtagtggtgcccgacgatggttatctgcgggcttgctatgatctttgtcatcaaaagaatgtgttgtttatcgcggacgagatacagacgggtatcggccgtaccggtaagttattggcttgcgattacgaggggattcgtccggacatcttgatcttgggaaaggcgttgtccggtggggtcagtccggtctcggcggtattggcggacgatgagatcatgcttacgatcgctccgggagagcacggttctacgtatggtggaaatccgttggcggcgaaagtcgctatcgcagccttggaggtggtacgtgacgagcatttgtcggagaatgcgtttaagatgggtgagctgttccgtggtgagatggagcggattaataatcctatgataaagaaagtacggggtaagggcttgctgaacgctgtcgtgacggaacctaaagatgggaagacggcatgggacatctgtttggcgttgaaggaaaacggtttgatagccaagcctacccacgatcatatcatccgcttcacgcctcctttggtgattacggaggagcaaatgatggaagcgattggcattatacgagatacgttcgctaaattctagtgtatgaagataaatgtaataggtgttcccttgaatctgggatgtgaccgggctggcgtagagcgtgccccgaaccaccttcgggaacggggattgatgggggtgatccggaagaacgggcataaagcctttgacttgggtaatttgtatgtaccccctgttagcgaggcggataagttcgtacggggtaacagcatgaaatatctggatgcgatcgtggaggtaaatacgaatctggcggagttggtttatgatacattgcgtggaggagcgttccccttggtgattggcggggatcattcgctgggtttaggtagcgcctcgggcgtgggtaaatgttatgatgatttcggtattatctggctggacgctcatggggatatcaataccagcgagacttctcccagtggtaatatccacgggatgcctttgagtgcgttgatggggatgggaagcgaggaactggtgaatatctacgctcccgggaataaggtgaatccgcagaacgtattcttggtcgggacccgcagtctggatgagggcgagtgggatttgatcgagcgggagaagctgagtgtctatacgatggagacgatccatctgaaaggcatcggcttcgtagctgaggatatcaagcggaaattgaaggaacggaagatccgcaacgtgcatttcagcatagacgtggatagcatagacccccgtttcgctccgggcacgggaacccgtgtgtgtgagggactgatgccggatgagtttaataacttcgtggatcatatgttgtctacgaatctggttaagtcgatggatttggtagagctgaatccggagctggacgtgaacgagcagaccacaaacctttgtctgcagatcatcgattatattaccgcccgtctataaggaatctaaattccatggtttgtgataagagtgtgaaaaggaagtccccttgttccggttaagaccggatacgaggggacttgaaaatacgatatgtctattggtttatttcattcttcggatattggcgtaattgaagctatcgctcaagaaatcgtcctcgctgaatttatagccttgcggtccccagttgcccatagcgagcatggcgatcatcttcatcgggttgaaaccgctcatatcgccgccggcggccgctagaggaacggactccatcagcttgcgcatggaatgtggataattctcgttgatcaccatgttgcggtataaggcaaggattccatttccttgctccttacggttccaagtcagtatatatgtaccgtcgttggcttccgccttcgcttggagatcgggcagtttggcggagttggcgtccgctatgataaaggttacgaaaccttccttgtccactttaggcatttctttgtcgtaaatagaggcatacgagtaggtctcggctgacccgaggcatatggaccagtatcgtacatcggcggtggcgtattcgcttacgcttttaggagccgtaggagggatgaaacggaaagttgctacctccccttcgttcagtttgatgcgggcgaataggtattctgccgggctgttcgggtacattaggctcagcggggcacgcatgaacgggagttgcggcaggtcggcggagaaatccatcggcggcaagttcaacgattcgtggatgttgcagacctcacgcttcgggaaatctacttcctcacctgtagtcacgttgaaagcttggatagcaggcatgtccacgccgccatactcatcgccgctatattgtttcgccaagtaaagacgcatgaaaatggagaccatattgacatcctccgggaactcacatacgttcttcatcgaggcacgtgcgctggcgggggtgttagcgggaatgatgtaaatcgtatagccatttgctccgtagtcatctgtttcctttacataagggttgatggagctgtcgtcgggttggatatttacgtcttcaatgctggatacgtctatttgggtctcgtcgttataaaccgtgaagttgaagaagcgtgacttcgggaactttccagtcaaacgaaggccgatgtttggattatctttgtaagaataggtgtattcccaataatcggcatagatatcaggaaaggccagtagggtttgattgtcgcctcgaagcgtcttgccccattgttccttgggttccgggttgttgatttgaggggtattctcatcatcgtcgtcgcaagcggtgaacatacccacagtaagggctaccaacattaagtaaaaaatcttcttcatgattctgttcgttaattaatctgtttgttattaaaatgagagcgcaaaagtatctcatttccaattagggttgacctattgaaaatgaaataccttggataagaccacagaatcctaggaatggaacagctagaaggggtatccgatagcgaagtggtaacccatgccgtccttgaatttcgggatattgtaatagcctttctttccggtatcgtaagggagatgcagaccgatacccacgtcgaaacggatgacgataaaggtgaggtcgtaacgcaggccgaagccggttcccaaggctagatccttgaggaagctaccccatttcagttgtccgccgggacgatccggatcgttccggatcagccagatgttaccgctgtcgaggaaagtggccccatgcaggtcgccaaggatcgggaagcggtattcgaggttggcctcgaatttaagatcacccgtacggtcgatgtaagcgtatttattgttatcgctgttttgatagtagcgtccgggaccgatgctgcggatcgtaaaagcacggatgctattcgctccgccgatgtagaattgctcgttataaggggaggtacgggcgttgccgtagctataaatagcgccggccattaatcggcctacgagatattgcttatgcccgagggcgtaattataacgtatctcggcggttcccttgatgaattgggcgaaggggttgccgagtaattccttatcctctttattgaatttcttcccggctaacgcataaatcccatccaagacaaggcccgcttgggtaacggatgcctgccaccaaagatggttccggcgactggtaatcggggaatcatcataggtataggtatagttcatggccgggatgaattgattttgcaaactcttttttagagccttattcacgttggtaatgctgtcgaactcgtgcgtggtatgctggagcaagttgaacgtcagcttgaaaggggtgatggaatgatgagacgtggcagtaggctggaactcatacgaggcgtcaccaccgaatgccagcaacttgaagaaacgggctcggttcatctggtccgcatagaggcggaaggtggtgctggccgggaaattcatgtcccgtttgctgaatgtagggaacaatacccgtgggaaagtcagcgtggtagtcaagcctaactcataactgttgatcttggagttgctaccatccagcttgttgccggtctgccattcgtaagagccgcggagtttcacgccgaaggtctcgccccctccgaagacattccgtttggtcacgctgaaaatggcgcccggacccacttggtcgttgctcttggcggtaacgttcaactcgagctcgccgtccaatggaagatcgtagaccgtattgatccgcagatccagcgtatcttgacggcgcatggtatcacggggggaatattgcaactcggcataacggaagatacccaagcgggacagggcggtttgcgtccgttcctgcgcccgctggttgtaaagttcccccggcttgaaatataaacggttgtaaatgaccgaggggcgaacccttagcttgccctcataatggatcgtaaggtccttatagcggatcgagtccgtgggagtctcattctggtaaccgtttagccagacggatatatccccgagcttccaagggcggagggccgaggggggcaggctttccttcggggccacccgtaaggccactttcccggggttcaacaaggtatccgcttgataggtgatgaaatcgggacggaaatagtaatagccgttgttacggagcaaggacgagatgcgttcccgctcggcttgcaactggacgacattgaaattctctcctttgtggaggatacgatcgccgatcgtggcatcgatcaatgagtcggcacggtgacggatatggacgtattggatgctgtctagcgtatacggatcgttcatggtgacgctatattccagcttcgccttccggggattcttgggatcgggtacgacctcgaaagaggtctctccattgaaataaccgtattcgttcaataggttccgggctaccttgacacggacttccgggttcacggtggtgatcagcaccggtttcgacgccagcttgttgaagatccacttgccgaccttccctttcttgttcacgaaagcgttgtagacccacaggccgaaggggaagggcacccggatcgaggagcttcccagcaaggcgttgttggggggataggctagggcggcctcgacctcttccaaggcggcttcgccgggtttggtcttatcctcgttcttcacctctattttcttgataccggtatataggaccgctccctcgggaaggttcttcgtggtggagcaagaggtgagtaagaaggccagcagcccgagtagcgccagcgacgataggatcgctctttgggtagacaccccccctcgccctggggaagtatccttccctgctttgggaaggcatgtttccctgctctgggaaggcatgtttccctgctctaggagggcatccttcctaaaatatattaaaacatttttcatattcattccttttctgtttcctctttcactggtttcactttcgttttcttgaagttgaatagctccctgagatgcatcattttcttgcggagcacgataccggctccggtctccgtgatctcgccttccagcaggctctcgtagttcttgtcgtggaaaagtttgacgtaacgggagccactgctgtctaaccgatattctacggatacgttatcgatgaacggctgcgcctgtccattgttaatgttctcgccggtagagatacggccgcctagaaccacacggatacggtcattatagaatcgcttggcgaagcggaaggagtagtcggtacgggtaccacctccggcgtcgccattatcgtcgtacgtctccatgccgaagctgatatccacggatttcaaggcacttccggcgatgttgttgatctcgctttgcaagaagctggtcaaggcgtctcccatatttacgttcaccttgccgccaccaccgcctccgccgaggtacataccggtcacgagcatgctgacagccagcttcgcccgttcctccgggcctttcgaggtcagttcctcctgcatcgccatgtcttccggggcggtgagggtaaattgcaaccctaggttctccagttgttgggtcagttcgatgcctacgtcgaaattcaccaagcggggcgatgattgcccggttagggtgacggacgtacggactcgctcggtagccgtaaggttcaaggtcgggtccatggggttgcccgtccattgcacgtagctaccctcttgtacgttgaactccttcaatgggatcaccgggatggagtacttgatggttcccccggatagcgtgtagcgtccgttcaagaacatatcgccttgcggggtatactggaaggaaagatcgccgccaccctccagattgatatggttggactggtcgggacttaaatccacgttcgcttgtacggcgggatcgatgtggatcgtcatcagcatgtccatgcctcccatcggcaacgggggtttacgaggcatgcgccggcgtaaggtatccgtgaaagaggtgaaggttaccatgtccgacatacggtcttgcacggtcagcggggagtctttcagcacgtaggtgatattcgtcccgcccaataattgcaagtcgcctcgcatggtcaaggcatccaacggcccgcgtacggtagaattcaggttgacgaacagctttccgtagacaaggctttcttcgtttttcttaacgttcagcagttgcaagttattcgccgttagtttaagattggcggtcatgcgggataaattgttgaaatccacttctccgttgatgataaacggattcttgttgtatgcgtaaataccatattggttgaacaagatccggttgttctttatttctatctttttatcgtcgaaacggaaggtagaacctgcggcgcctacataaacggaggcggtatcgagaatcagatatccctcggccatgggtttatcgctttgtccgctgatagcgagcgtaccatcgaggtctccgcccattttcgccatatcatccggaatgaacgggttggcgatatccaaggggaagtgcatgaactcgacagtaccgctgatatggtcggtctcgcccatctggtataaggcggtaatggcactcacctctttccggtcccggaaaaggtgcatatccacttgatggttcccctgctctaaaggtagatagactgcgttgaacatgagttcgccgacccgctcgttctcataatacagatcatcaatgttcatatccgccacgaccatgaaggccgagtcggaaggagcgtactggaaatcggcgttcaatatacctttcatcggcgggatatagctgaatgcgttggagataatcccaaggtcgatctggttcaactcggcgtggacttcctccatctcgtcattttccgcttgggagtgtatccacaaggcggcgttattatctccgctgagtcgcaggttcgcctcgatatccttcatgctgcgtaccacgacgtaattatccgggttcagcttgaaagggcggaacgctatgatcgggtcatcggggaagagatggaacttgaccccgttctgtatcttatcggcccggattccgagcaacaagccggtctcgcctttcccgtccttgaaataaaggcgggcgtcgccgaagccataacgtatttgcccgtccagcccggcgctgaaaggttgttgctgcctgtatttattcttgatcacttgggcgctatagagtaatccgagcgaatcttggtgcatctctgcccggatggtatcgatctgcatcgtatcccgtgccagatcgtaaatggaggcatccatgcgtatacccgtttccggtgaggtataggcgttcatggcgatgctcttgaaatctacgtaataggtttggagatagttgtagatcggattgtcctgtcctgcccgtacctcaaggtacatatcggggaggagcgggcgaaggatctccagattgacagtcgagtcccgttccaattggagggtgatatcgttcgataccttagtcaacttatccgtgatgtggtgtatgcaatcattacccgtgaggatgatccctaaatccccggcgtggaaagacacacgggtggtatcgatatccgtccgggcatgcaaggtcagcgttttcggcttgaaactttgttttggggtgacgacctcccagtttcctaacgtaacgtcgatcgtgttatcttcatccagattactttctacctctgcgaagagctggaaagaggtggcgaagggatttgccattaagtgcataccctgtaaatccatgttctccacatccgctatcaacatcgccttcacctcgtgcttgtggagggtcgcgtttaaggagacatccattttcgccaacgggtatttgctaagcagatccactttcagtaagttcttttccagagagccatcgatggatacgtctgataccgatgaggcgccgtagcgtatatccgatatcttaccgtccagtttggcccatgtacgttcagagaaagggtctgtgccccggccttctgctttaacagaggcggtcagccaaaatagagagtctttgggcatgaaatgggtaggttccagactgtctatccgtaaattagcctcataagccagttgcaccggattatagcgggcggtcagacctactttgcctttatcttgggtaagaacaagctcggtgcggtattcttgatttgcgactgtagcttcccccttcaactgaattcctgccggaatggcaaattgatcccgttgggaggcgggaagcatcgccagcaaaaagtccagattaccggatcgagcctttaactgaatctcaccggttcgccggatgctatccgtcacggactccatgctacccgtgacgttcatctgaaacgctcccggcagcatgatatcgccttgtgtgatacgtatactggagaggttgccttctacgccagccgtaatagcgagaggcttgtccggataggctttcttgaaatcctccggtagggaacctgccgctatcaataaatcttctttccccaacgaggcgtttaacagggctttcatgctaccttgtgggtggtcctcgagggagctccaagggatagtcgctgtcaatctcacttcggaatttggtgtctggagaagtaggtccggtacgtctatctgttcatggtcactccggacatttcctgctaatgccgaaaccttgaggccggaacgttcttccacgaagaattccttgatgtgggcgtttatttcttttccttgatataagatggaatcgatagaggtgttcaggttcgttaaactaatatgggagaaatcgagtccttgctcgggtgccgcgtaattcccgtcataagcgaatgtagaattcgttatgtcaaagtttctcgccttatattgttccgctccaagatctacgaggccgttatttagcccggctttatttacgaaagccgtaaggcgtaaggaatccgagggcatttgtagggcgaaggctacccggtccaaactgattttatccagcttgagtacccagttcagaggtgtggaagtcgtgtcttctttcgaggttgaatcatttaatagaagggtaatggcggtatcggataaatctacggtattaaatgtagctttctcctcggacaggtctatacgatcggcgtgcaggtaaagctttcccaagaatcctttgatttccataccttcaatcatagtcccggtgttaacctttacgttccggaggtcgatcgcctctaccaatacttgcttccgcaaaagaggaagggcacgaacccgtaccgtcaagctctgtaaactcaacaaggtatcggcgggaggatttacgacctcgacacccttaaccgtaaggtctaacgggaaagatagcctaatctgctcgatcccgatttgcataccagtcacttttcccgcgtattcggtcgctttccgtaccgcgaagttttggaaaggaggtatatatagtaatatagagagtaacaataccaatgcgatcggtattaggcatatcactcctatccgtttaatccatactctcatgttgatacgtttctctttttcttatttgtttatttgcctgtttttatgacgatcgctccgttcgcgcctctcaccccgtattcacctgcgtctttcaatacttttaattccgagacatcttcgacgggaatcgtgtttagaacagataggtccatcggtataccgtctaccactactagcgggtcactaggactgtttagggaaacactcgcacggatgcgtacggaaccatcggcgaatgttatgccactcatccttcgtagtaggcaatagagatcccggcatccggttttctgtatctcttctttattcataacgcttgagcttactattttgtttcgttccctttccataatttctttcagggcctcatccggttcaaaactacgctttgcgttgaatgtgctattctctaaagtaatggttatataattgtatccgttgactgggactttgactacatttcttgttttcttaatagtgacgaacaaggtatcattcaggttagcccccgggatggtgaatacgccatgtttgttcgttttcacggtgatcggattctgactgcctagcgtgaccggatagcgtttgattattttatcgctgatgtcacgcaatacaccgactaaagtatcattctgtgccaaaagtatttgactgctgaatgataagatgatgattgaaagataatgtattgttttcatagctcaatctttttagctgaacataacacaaagataatataatatttcttaaaggcagagttttagggcaaattcgtaataggtattatttttacgtttctatgtggtctcatttgtcgctaaaatgagattactataaatggaaatcattacatttgccaaaataaaatgaacggtatggaattagatttagcctatttgtgtaaggaggttcgagaaatagctcgtgcttctgcgacattcttaaaagaagaacgccgaaagtttgaccggaacttagtggaggaaaaaagtgctcataactatgtatcttatgtggataaagaatcggaacgacagatcatagaggctttgtctactttgctacccgaggctggttttatcgcggaggaaggctctggaagtttgaccgatgaggaatattgttgggtaattgatccattggacggtacttcaaactatattcatgatatcgcgccttattgcgtgagtatcgctttaagaaatcggaaggagttattgttaggagtagtctatgaggtgtgtagggacgagtgtttctatgccgtgaaaggcggtaaggcttacttggatgggaatgagatacatgtatcggatgtctcagtactggataacgctttcattgcgttgggtttcccttataactctgatgattatcgtccggtagctgctcatttggttgataggttgtatggttttgcgggaggtacccgtttgatgggatctgccgccgctgaactgtgttatgtggcagcaggacgttttgatgcccgtatagaggcctttttaggcccttgggacgtagctgctggtgccttgattttattgcaggccggaggaaaaatatcggatttcaatggcggagggaactgggtttctggtgagcaggtagttgccagcaatggcaagattcattctcttgcgttgtctttgttgccctaatactagggtaatcctgcgtattctagtgcttctgtgtgtatttaaaaggtaaaagagtttaaacttacttcttatttgcggggtgtttgatccgttttgattttcaaaacagatggaggaatacaaatacccgtaaatccttgtatgtgtctaattcagtaaaaatcaagacttttaggattagagattttacttacatttgtggaaaataaaaatgttacagagtatgaaaaacaatctatacgtcttttttctgttctttattactggactaatgtcatgtagccatcactcaggtctatatgaacatgcggaaaagataatgtcccaacatcccgatagcgttttaacattgctatcaacaatacaagatgtaaatgatctttcagaaaaggatcgtgctatgtactacctacttttgacagaagctcaaaataagacttatatcaaacctacttcagattcgttaattacaatagcagttgaattttttgataaaacggaagattgggaaagaaaagcaaaagcttggtattatagagggagaataaaccaagacctaggtgatgctcttcatgcgcaggattattatttgaaagcgttacaggatgagagtaaggtagaagatcatgcgctactaggacgaatatataatagcataggaatgttatatacatatcaaaatgtgtatgaaaaggctcttccttaccaaaggaaggctttagatcgctttgctttaatgcaagattctgttggtatatcgtatgttttgagagatatagggagaacttttactgctttagaaaagaatgatagtgcaatagcatattatgaacaagctcttcttgtttgtaataatcgtaataagcctttggtgtatggagaattagccagtttgtatatagataaaggagaatatttaaaaagttataaatatatacagaaagttttgagttctccctcaaaaagaattttgttggatcctacatatcttactttaggaaaacttttccataaaacaaatcagatagattctgcctatttttatttacgactttgtacaaatagccctattcttaaaacacgtgcgggtgctttttactatttggcgcgattagaattagaaaaaaagcattggaagtattatgctatcaatcagatacaatatgaagaattgagagattctattaatttgattaagcagactgagtcaattcgtaaaatggagagtttatatgattatcatcaagctgaatcaaaatttttgaaagcgaagattttgcttgataaaatgaagataagatatttatatatgtgtttgtttggtggaatttgtctgatttgtgttgtaatgggggcaatatgtgtatatttttctctgaaaagaaaaaagatgaaactgtgtgagcaacgagaaagactatttgctctaaagaagaagagagacgaagatcaaatacgtcttgagcataatgaaaagatgatccagtgcttggaaaagcaactggaagagtcttccatggcctatactgaaaaagataaagaacttatggctttgcaaaaattaaaattagaagctgaaaatcagactttaaaatgcgttaaaacggaaaagcagcttctgattgaggaattttgtatgtcggatatttattatagattccaccttaaagaagaatggaggcctaaagaagaggattgggatgagttgtttaaggctatagataatacatatgacaattttactcatcgtttaatgggtgtcgctcctagattaacgatgacagaattgcgggttagctgtttaattaaagcaaatgttcctcctgttactattgctatgttgattgtgacaactccaactaatgtttcaatgataaggaaacgattatatgataaaattcactcagagaaaggttcttctgagaagtttgataagtttatacgtgacttttaataggattgtgcataatttgtgcaattagtaatgccttgctttttaactaatcatgctatgtttgtttcacaattaatacacatttgttatgagaaatgcatttaaatttgctgttttagcagttatgttgtttttagttcagttttcttttgcggatactatccctacagaaggacaatggaatgaggaggattattatcgttccgttaacacaaaccgtcctccagtcgcatcaatcgaaggagacatcctttccttgagctttgaagatgatttatcaaacttgaccgtatgtgtcatgaatgataaaggagtgaaagtctatgaagatgttgtttcttcagaggcaggtggaacttattctttctctttagcgggagaagtaaatggccagtatcaggttgtgttgttacatcggttgggacacttgaccggtaactttaccttggaataaaaaattaagaggttttgtaagaagaaagagctgttaagtttctcggtaaaatgggaagcacagctcttttttatttggacaactgtaccatatacgaatctttacttgaatacgtagctatgtacatgctttaccgctaaacgtatcattaatcagccgggagccattctgtttattgtatatttcttgaaaataggcttcattgtagcctgctttactatccatagaaatagtgattagtattaatagaaattcaaaatactatggatactaatcggagcttggatagatacgattttattgtatgttgattattaggtgtataggtaatagtttggaaatattagacttattgtgctttttaagagatcaaatttggtgtggttgggctatttttatttccaagtggtgttatttcatgactatattataacttgaaaaattcatagttatgaaattcacaactcataactatgttttaaaaaaaacataactatgaaattttataggatttagctgttaaaatcaatatggatttcccccttgtctaagaaatgacaggacaatactattatatatgccgtttattctgtatttttgccagaaaaattagcagacatggctgaaagcaaagttgaacacctattggatagcattcattttccggaagacttgagacatttgtcacaggataagttggagcaggtatgtgccgatttgcgtcaatatattatcgatgttttgtctgagaatcctggtcacctaggtgcaagccttggtacggtagagctgacagtcgcccttcattatgtattcaataccccctatgaccgtattgtctgggatgtcgggcatcaagcttatggacataaaatacttacaggaaggaaagatattttccatacgctccgtaagtttaaaggaattagcggcttccctaatccggcggaaagcgagtatgacgcttttatcgccggacacgcttcaaattcaatctctgcggcgatgggtatgtcggtagcctcggccttgaagaaggaactggatcgccatgtgatcgccgtgattggggatggcgctatgaccggaggactcgccttcgaggggttgaataatgcgtctgccaaccctaataatttgttaattatcctgaatgataacgatatggcgatagatcatagcgtaggtggtcttagccagtatttagtggatataacgacgagtcaagcctataataaaatgagatacgatgtgtatcgaggcttaaagaagatcaagctcatcaataacgatcgccgggaaaacatcttacgttttaacaatagccttaaagcattgcttacccagcaacataatttatttgaaggcttcagcatccgttactttggtccggtggatgggcatgatgtaaattatctggtgaaggtattgaatgatataaaagatatgcaaggccctaagctgttgcacatcaaaacgaaaaaaggaaaaggctttaaacctgcggaagagtccgctacggaatggcatgctcccggaaagttcaataaggaaaccggccagcgtattatcgttcgtaaattagatgagcctcaattatatcaagacgtattcggtcatacattggtagagcttgcggagaaagatgaacgtattgtaggcgtaactccggctatgccttccggttgctcgatgacctatatgatgaaagccttcccggatcgtgcgtttgacgtgggaattgcggaaggacattccgtaactttctctgccggattagcaaaggagggaatgatacctttctgcaacgtgtattcctcgtttatgcagcgtgcgtatgatatggttatccatgatgtagctttgcaaaaactacatatggtgatttgtctggatcgtgcgggattagtgggagaggatggagctacacatcatggcgtgtttgatttagcatatcttcgtccgataccgaatttggtaatcgcttccccattgaatgagttggatttacggaatttgatgtatacaggctatgccgcttttgatggcccgttcgtaattcgttaccctagaggtaagggggagatgaaagattggcgtaacgagatgcaagtattgcctataggaaaagggaaaaagttgtgtgacggggatgatatcgccgtactttctatcggaccgatcggaaacgaggtgatcaaagccatcgagatggtgaaagaagagggggtatcgatagcccattacgatatgatctacttgaaaccgttggatgaggagctgttgcatgagatcgggcagaaatataaccgtattattacggtagagaatggagtgataaaaggaggttttggtagcgctgtccttgagtttatggcagacaatggctatacgcctcatgtaaagcgtatcggagtgccggatgcgtttatcgagcatggttctataccggaactgtatcaattatgtggtatggatgccgagagcattgcgaaacagttgaaaaaggagaattgattattgtcaattaataaaatatgaaaattgtcatagccggtgcgggagaagtaggtacacatttagcgaaaatgttatctcaagagaatcaggatatcattttgatggatccgaatgaggaacggctgaatttctcaaaatctagcatggagattctccctatggtcgggaatccgacctcgcttagagatttggaggaagcggggatcaagaaagcggacttgttcgtaagtgttactcccgaggagactaccaatgtgacggcttgtatgttggctcataatctaggagcgcatcgtacgttggcccgaatcaataactacgaatatttattacccaaaaataaagaacttttcgagaaactgggaatcaactcgatgatttaccctgagatgttggcggctaaggagatcgtgacagctgtgcgccgtccgtggacacgccaatattgggagctgtttggtggagctttaattctgataggtgttaaagttcgggataattcccgtttggtgaaccgggtattggccgaattgctaaatgagcagaagctatatcatattgtcgctattaagcgaaagaacgagacgataatcccccgtggtacggaccggatagagtctggtgacatcgtattctttacgacgacccgatctcatatagaggatgtgcgcttactggccgggaagaaagatccggaagtaaagaaggttattattatgggaggaagccgtatcgctatccgtgcttgccaatatttaccgaataacatccgggtaaaagtaattgaggctaataaagagaaaagtcatcgaatcgctgaggtagtgcctagtaatgtattgattataaacggagacggccgtgatactgatttgttgatgcaagaaggcatcaaggatgcgcagacttttatagctttgacggaaaattccagcacgaatatattggcatgtctggccgctaagcgtttaggtgtgtttaagacaatcgctaagattgagaatatcgattatatccaattggcggaaagtatggacatcggttcggttatcaacaaaaagctgatagcggccagccatatctatcaatttcttttggatgcggatgtctctaacgtgaaatgtttgacctttgcgaatgcggatgtggcggagttggtggctcgcccggattcaaagattaccaagaaacaagtcaaggatctccgtctgccgaaagatatgactctcggtgggttgattcgtgacggtgaacctatgatgatcaagggtgatactcagatacaggcatacgatcatgttgtcgtattctgcttggatacggctatgcgtaagctggaggactactttaactagttgatagttatgttgaacgtacgttttatagtgaagatgctaggggtgatgttcatccttgagactttttttatgctggctgctactgtcgtagccttcctttatcgggggagtgatgtatatccgcttcttatttcaagcggaatcttattcgggaccggttttttgttctactctatgggctttaaggcgaatgaacactcggccggccggcgggaaggaatgttgatcgtgacattgacatggattttattctctttatttggaatgttaccattctatataggaggatatatagataatgtgaccgatgcctttttcgagaccatgtccggatttacgactacaggctctactattttaacgaatatagaagcgttgcctaaaggtatcttattctggcggagtcttacacagtggcagggaggtatcggtatggtcgtattcaccgtggctttgatgcctattttcgggggtggtgcctcgcagatgtttgatgccgaaacgcccggtataacccatgaacgttttcgtcctcgtattacgcaagtcgctaaacgcctgtggggggtgtatgtttttctgacactttttttagtcggccttttatgggctggtccgatgaatttgtatgatgcggtaaatcatgcgttcacggctatatctactggtggatattcaaccaaaaacgcaagtatcgcttattggaattcctcttatatagagtatgtaataactattttcatgtttatcggagctaccaatatgacattggtttatttctgttttaatggaaatgtgaagaaattgattaaagatgaggagtttcgctggtttttcttttttgttttaggcgctattatcgttgtcatggtgtggatcttgtaccttggattcgcctcggatgtagagaatgcgttccgtaaggcggctttccaagtggtgaccttggtttctacgtgtggattcgctacggatgactatattccttggggaccgtttttctggtttatcgcattgatcttgatgtttatttgtggatgcgccggatctacttgcggtggcttgaagatgggacgcttcgttattttaacgaagaatctctccaatgaatttaagaaacagacacatccccatgcggtgattccagtacgaatgaacgggcatgtcgtatctggtgatatcgtacatcgtgtgttagcttttgtgttcgcttatattacgttaatcgtggtgagctgtttggctttatctttggatgggatgggattttcggaggcgattggtgccgctgtttctgctataagtaacgtagggcccggcttgggaacgcttggtccggtaagtaattttgcggatgtccccacggtgtcgaaatggtttctgtcttttttgatgttaacagggcgtctggagatatttacggtattaacgatattagtccccggtttttggaaacagtaaaattattgaaaatgaaaagtatacaggtcattgctagtctgctgtgtggtattctgtattgtgggatttctttaaatgcccagaatgtattgaaagcaacgggttggatgccagagcacacatttacttccggaatagaaggtccggctgtagatagcgaaggaaatttatatgccgtaaattataagaaagaagggacgatcggtattgtacgcccagatggtagccatggctgttttctcgttttgccggaaggatctaccggaaatagtatccgcttcgggaaagatggaaatatgtacgtggcggattatacagggcataatatcttaaaagtggatatgaaatctaagaagatcagcgtattcgctcatgagccaaagatgaatcaaccaaacgatattgtatttgcccccaatggaaatatgtatgcgagtgacccggattggccgaatcaaaaaggccaactttggttgattaccccggatgcgaaagtctccttattggagacgaatatgggaacgactaatggcatcgctgtgagtgaggatggtaaacgcttgtacgttaatgaatctgcccaattaaaagtctgggtatatgatatatgcccggatggtactttaaggaataaacgtctatttcatacttttgaggggtacggtatggatggtatgaagtgtgacgagaaaggaaatctttatatttgccgttatgataagggcactatagctttgttaaatccgcaaggagatttagttgaagagattcaattgacaggaaaacagccgtctaacttaacatttggaggacctgatcatcgtcaatgttatgtgacattgcaggatcggggttgttttgaaacctttaaggttccttatccgggaaaagaatggtaacccgatatacgtttttgattaattttgcgttataataggtacggaatattaaaaagatatatagatgatagaatatataaagggtgaaatcgtggaacttacacctacacgtatgattttggagtgtggtggtataggctacgagctgaatatatccttgaatacatatagtgcgtttgggaacaagactaccggaaaaatatatatatatgaggtaatccgggaagatgctcatttactatttggctttgccgagaaaatcgaaagggagttgttccttttgcttacttccgtttctggagtgggaccgaataccgcacgcatgatcctttcttctctgccgccatccgaattggttcaagtgatcggttcgaagaatgaggccgcattgactgccgtgaaagggattggtttgaagacggcccagcgtatcttggtagatttgaaaaataaggtgaaacctatggagagtatggccggaaacttgccggaggcatcaatctctaatggagcggtaaccgaggaggccgtagccgcattggttatgttgggtttccagaaagcggcttcgcaaaaagcggtatccgctattttgaaaggctcgcccactttagctgtggaacaagtaattaaaactgcgcttagaatgctttgataattgacaattgaggattaacgattaacaattgacaattaaatgagaaaatgagaaaacgaatactgaaatattccatatggatcgttgtattattgtttggtgtcggcttgtattcgctgaatgctgattaccttgcgtatacatcatctttgccggaattggagttgctggaagctccggaggatacgattcctccccgttatccggtagctaaaactacaccggaggaatatcaagatatcgtgaaacaatcacctgccgatttgcgtgatccggagaatgtcaagactacgattgagtatgatttaaagacgaatacgtatattgtccgtacgaaattaggcgatatggagattggtacgccgatgagtttaaccccagcggaataccaagattattctatgcaacaatcacttcgttcctatttccgccaaaagaacgaggaagaattccaaaaagctacgaataaacagttcaacttaaccgatatgcagtttaatatcggtgcggcggaacgtattttcggccccggtggagtacgtgtaagaacacaaggttcggccgagatcacgatgggattgaagacgaataagaataatgatccttctcttccggagcgttcccgtaaacgtactttcttcaattttgacgagagtgtgcagttgaatgtacaagcctcggtgggtagcaaggtgaatttcggaatgaattacaataccgagacctcttttgatttcgattccaaaaaattgaaattggcgtatacaggcgaggaggatgagattatcaagtcgttagaagccggtaacgtgagcatgaataccagcaattccttgattaatggaggtgcggctttatttggtatgaaagcggatttacaatttggtaagttgcgagtgaacgccttgtttgcccagcaggaatctgaatccaagacggttagctcaaaagggggcgtgcagacgaagccctttgagatcaaggtggatgaatacgacgagaaccgtcacttcttcttgggccattatttctatgataactacgataagtttatggagtctttgcctaccgtcacctccggtatcgagatctctaagatagaagtgtgggtgaccaataaacgaggtaattatgaccagtcccgcaatatcgtagctttcaccgatttgggagaaaatgaatctcgtaatatcggtaatactgcgttggtgatgccttccggaacggacagacgtccgaataattccgcaaacaatttatatacgactttaaccactcaatttacggatgcccgaaagataagtatggttaatgatgcgttgaaaggctccatggagggaggacgggattttgaaaaaatcgagagtgcccgtttgctagagtcatctgagtatacattaaacaagaaattgggttatatttctttgaggactcagttacaggctgatgaggtattgggtgtcgcttttagttttatctataatggcaagacctatcaagtcggtgagttctctacggataataaagagaatacgagcgactgtatttatgtgaagttgctaaagggtatcacgatgtcgccggatatgatgttctgggacttgatgatgaagaacgtatactcattgggtgcttattcggtgcagaaagagaagtttaagttgaacgttacctaccagagcgattctaccggtacgtatgtaaactatcttccggaaggtaattgtgcgaatcaaatcttgattcgggtattagggctggatcgcttggatacctatgacaatccgaatccggatggtttcttcgattttattgacggttatacgatacaggcggagaccggtaagattatattcccttgtgtacaacctttcggttcgaaattacgggaaaaggtaggtaatgcctatgccagtaaatatgtattccaagagttgtatgactcgacattaaccgttgcccgccagatcgccgagaaaaataaatttcttttaagtggtgagtataaagcctcgtcgggttcggagatcgacttgggagctactaacgtggcccgtggatccgtacgtgtcacggcaggaggagctacactgaccgagaatgtggattatacggtagattacagtttaggacgtgtgacgatcttgaatgagagcatcatatcgagtgggacacccgttagcgtatctctggagaaccagtctacttttaatatgcagcgaaagacgatgatcgggttagacttgaattaccagttcaataaggacttcatggtcggtgccacggttatgcatatgtcggaaatgcctcttacggtaaaaaccactttgggagatgagtctataaagaatactttatggggcttgaatacctcttataaagccgagagccagtggttgacaaacgtatttgataagttacccttgttgacattgaccaaacctagccaaatctcattcaatgcggaattcgctcatttaatagcgggacattatgagaatcaatatacgggtggttactcttatttggatgacttcgagtctacacaaagtggtatggatcttttgaacccgtatgcttggaacttggcgagtaccccctatgaagattcgaatcctaaatttccggaagcggagaaggtgaacgatatcgcttatggtaaaaacagagctttgttggcttggtatacggtagacggaatcttcactcggaagagttcctcttcccgccctcgacatcttacgaatgatgatttatcgaatcattacacccgtggagtcagttataaagagatcttcccgaataaagagttgggaaccaatgataatacgactttgcctgtattaaacctcgctttttacccgaatgagcgtggtccgtataacctagatgcggaaaatgtaaactcggacggtacgttgggtaatccggaaaaacgttggggtggtgtaatgcgcaagatcgagcctagcgatttggaatctgccaattatgaatatatcgaattctggcttttagacccgtatcttgaggacgagacagccgagggtggtgacctatactttaacttgggtgagatttccgaggatatcttgaaagatgagcggaaattctttgagaatggtatgcccgtggacggtgatatgtcgaaagttgatacgactgtttggggtaaggtgcctcgcacgcaaagtacgggatatgcgtttgatgcccaaaatcgtgagctgcaagatgtcggtttgaacggtctttctacggaggaagagcaaattttccctacgtatgcggattatttgaataaattgagggcgaaactatccggcgagacaatctctaagatgatggatgatccgttttctccttttaacgatcctgccggggataattatcactatttccgtggggatgattacgatgctaaggagttggatatcctatctcgctataaacgatataacggtacagagggaaactcacaagaatccgatcaaagatatgctacagccggaaagagtacaccagatgtggaagatatcaatggcgataatacgttgaatgagacagagaaatattttgagtacaagatctctctccgtccaaaagatttgcaggtcggtgtaaacaacatcgttgatgagcgtactccggaagtaaccttaatgaatggtgataaggagaaagtaaaatggtatctatttaagattcctattaaagattatgagaagagggttggagcgatccgggatttcaagacagtccgtttcatgcgtatgtatatgacaggattccgtaagtctacggttctgcgtttcggtaccttggaattggttcgtggtgattggcgtacttatacgcaggatttgtcaaatcctcttattccgccaaagtctgatggacagatcgtcgtatcttctgtaaatatagaggagaacgggcagcgtcagccggtcaactatgtgttgcctccgggtatcagccgtatgttcgattccagtcagcctcagttgcttcaacagaacgagcaggcattgtctatgaagataacggatttatctcctgcggatgcacgtgcggtttataaatctaccgcttatgaccttcgccggtataaacgattacaaatgttcgctcatgcggaagcgccgattgatgagagcaagactttgtcgaatggtgatttctctgtatttattcgtttaggttctgactataagaataattattatgagtatgaggtgcctttggatctgactccccatagtactattctttataatacgaacaatagtgcggatcaagaaaaagtatggcctttaaataataccttgaattttaaactggagactctaaccgacttgaagttggagcgaaataaattgaaacgtcaaggacagggaaatataagctaccaaaaggtttattcgaaaaatgatccggataatacgcgtaataaaatcagtatcatcggtaaccctagcttagcggaggtgaaagtgatcatgatcggcgtacgtaataatacgggtgatatcaagagcggtgaggtttgggtaaacgaacttcgtatgaccgatttcgacgagaaaggaggttgggccgctaatgcgaatctgaacgtcgctttatccgatttgggtacggtcaatgtaagtggacgaatggaaaccgctggtttcggtgcgttggatcagtcgctggccgaacgtcggatggatgattattcgcaatatagtgtggcgacctcgattgagttgggtaagttgttccctgagaaagcaaaggttagcatacctttttactatgcttattcgaaagagactacaactcctgagtatgatccgttgaatgaggatattaagctttcggacgctttggatgcggtagagacccaagccgagaaagactccatcaagagttattctttggatcagaccactattaagagcgtctctttcaataacgtaaaggtagatatccgtagcaagaacccgatgccgtatgatccggcgaacttctcgttaggttactcttatagccagaacagtaagaagaacccggagaccgaatatgagacaaccaaggattaccggggtaatttcgcttataattatacgccttacgtgaaaccgttccgacccttcgagaagctgaagaagaataatggatatacgaaatatatcaagcaattcggactgaattacgttccgtcgaatattagtttccagacggcgatgatgcggaattactatgagattaagctaagggatttgacaagttctacggatggaggtaaccagttgctctcattcagtcacaatttcttgtgggaccgtgccttcagtttgcgttgggactttacgaataatctgagcatgacgtttacttccggtacgaatgcccgtatcgaggaaccgaatgttcaagtgaataagaaattgaatccggatgattatcaggtatggaaggattccgtgaagcaaagtatccgtgatttgggtactcctttgaaatatgaccaaacgtttaatgtcacttggaatatgccattgcaattcataccggcattagactgggtaaatagttcattgacttataatgccacgtacaactgggatcgtggagccaatgtcgctagtattgagttggaacagggtaatataataaagaaccaacgtcaatttgactggcagggtagtttcaatttgcagtcattgtacaataagaataaatatctgaagaagatcaaccagaaatttatggcctcttcccgggtaagcgctcgtcaaccggagaaaaagaagaaagaggtgaaactagagaaagagattcaattgagcccggatagtggaacgatcgtgcagcatggaatgtttacgaagaaggttcgtatcacggcacgtggagcggatgggaaggtctattcaattaaatataagccgatcaattatgcccaagtcatgatcttgaataaagatacggctcatttgaagctgacaattgtgcctggtcctcagcctttggagggaactttaacgaaagtcgctgaatatagtagccgtttcttgatgatggtacgtcgggtaaacatacaatattcgttgatagacggtatgatgttgagtggttacgcaccggaggttggtgatatgttcggacaacggcgtacaggaactttggctccgggactcggttttgcttttggagcggtaagaaggagctttatcgacgaggcggacgagcggggctggctggtaaagaatgagaatatgacgactcccgccatgatcaatagcgcgaagaatcttacgattcgtgcgaatctagaacctatagccggcttgaagattgatttgaacgcaaaccgggtagatacccgtagtaccgatatctattatatgcaagacggtatgcccgagcagatgggaggtagcttcacgatgactacgattgccttggggagcgctttcggcggcagcggaaacgctaataacggttattcctcgaaagcgttcgataaatttatcgctcatcgtagcgtgatcgcccagcgtttgatggatacctattctggtacggtttatccgagctccggttttatggcggggcatgctttagcgggaaaaccttatgatccagccgtagggggaggcgtaagcctgaattccatggaggtattggtacctgctttcttggcggcttatacgggtaaggacccgaataaggtaggcttgtcagccttcccgtctgttaagagcctgctaccgaactggcgtgttacgtatgatggcttgatccgtataccggttatccgcaaatactttaagagtatgatgttaagtcatcaatatcgttgttcctatagcgtaggtgcgttttcctccttcttggattgggtagatgccgggcaggatggtttgggatatatccgcgatatccagacaggtaatcctacgccgtcgtctccttatgatatagcggccgtgagtatcacggaaggattcagcccgttgtttggtgtggacgctactttattgaataatataacaggtaaatttgagttgcgcaagactcgtaacttaagcttgaatatttcctcttaccaattggtggaagcgctttccaacgaattcgtgataggagtaggatataagttgactgagtttaacaaggtgttgaaaatgaaaaagacacgcgacttcagtaatgatcttacgatccgcttagatttctcttaccgtaaaatgcaatcgttgatccgtaagattgaggatcagtttacgcaggctaccagcgggaatatcgccaagaccatccagttctctgcggattacgggttaagtcgtgccttgacattgagagcgttctatgatttacagatcaatgagccgatcgtgtccacatcttcttacccgacatcgaactcgaactatggtattagtttacggttctccttagcgcaataaaaagagtatagtctatttacaggacttcttggtctgtttttaaatacctgtctagcggtatggaataaacctttatatttgtgcgaaatataatttggatatgaagaatacttacaaattgatattatttcttctcttgataacccatgcctctttcggccaagacgtgaaagggtatattaaggatgcggagagcaaggaagctttagtcggggtaaacgttttttataaggacaaagggggtacgagaggaactgtgtctgatataaacggttattatgagctgaaagtgacggatggcgacgctgtattgacttttagctatctgggatatgaaacgttgagcgttcccgtgaaagtagatccgggagagttcttgacgcatgacgtatccttgcgaacaaactcaaacatgatggacgaggtcgtcgtgagcgtcgggcgttatgagcaaaaactaagcgatattaccgtctctatggaattactgaaagcgaaagatatcactcgtcagtctccgaaagatttaacggacgtattgaagaatatctccggtgtggacgtgacggaccggcaaccttccgtacgcggtggtacgggatggacctatggcgtgggtagccgttgcttgattctggtggacggaatgtcggtgctaactccgggttccggcgagataaactggaatatgatcccgatggagaacgtcgatcaagtagaggtactgaaaggggcctcttccgtattatatggctcttctgccttgaatggtttgattcacgtgaaaacgaaacgccccggattggatccggtaacacaggtgaacgtacaaggaggattgtatgggaagccgcgccaagacgggacgcctttatatggaggcttggatctctctcattcccgtaggatcaagaattttgatttgacagtgggggctaatacattcttggacgacgggtatcggcaggataattacaatcgccgtgtccgggtcggtgggaatcttacgtatcacgatccccgggtacaagggttgaactatggcgtgaacgtgaattatttgtataacgattataccggtttctttatctggcgttctccggaggagccctatattcaatctccgctggcgaatatgggacgccgtgagaatacattttatatagatcccttcttgaattatacgaattcggaaaaagggacgactcatcgtttcaaggggcgtttcttccatcggggaagccgtatcatcacgcatactacggataagtctctttttgacataacgaataatatgggttttgatatctcatccgtcccggagattatcaatatggcgcaaaactggcaaaccgagttattgccgaccttcttaccgtatttgccggaggtgatgaacgggaaggtgagcggattgatggctgaattgggcaagctgggaaatcattttttcccgacagctacctcggcggattatatggacttgatttcttgggtgatgggacgtactccgctacccgataagaataacgtaggggcttggttggtagatgccatgaaaccgatggagaaaaaagcgccggaggctacggatcatacctattcctataatctggattaccaattcagcaagaagttcgaacattcacaactcacggttggaggtacttatgagcgtattcatgcggattcgaaagtgaccgggcagcatagtagcgataatgtggctaccttcctgcaatatgatcataagtttatcgatcgtttgaacgtctcggtcggtgttcgtctggagtattaccgggtcgatgatttctaccgggaagcggagacgaagattttcggggcgaaggttccggtaaaacctgttttccgtggaggcttgaattatgaattgggtgagtatagttttatccgggcatctttcggacagggataccgttatccatccgttacggagaagtttatcctgaaggatatcggaggtgtgggagctttcccgaacgctgaattgaaagcggagcaaggttataatgccgaacttggtttcaagcaaggctataagttcggcaatttgaagggctttatcgatgtggccggcttttatacccgttacaaggatatgatcgagttccgtttcggcctgtttaataataagaccttcgattatatcgatgggctttccaagttgttcaatgcgttctctagcggcgacggcttaggaatcggcgctcagttcacgaacgtaggccgggcggagatttatggggtagacttgtctacctcgggtgtgtatgagtttaaccgtgatactcgtctggcatatactttggggtatgtttatacgaatccgatcgatatggacgtggattcacggaacgcggaggaggaagcgaatgatgacttaatggcgatgcgttcgaaatcgaatgacagcaagtatttaaaatatcgccagaaacattccgtaaagggggtatttgatctggaatggaaacagtttaatatcggaacgaatatgtcatggaaaagcaagacattggcggtcgattattttatggttgatgagcgtacgaaagcggagcttaacctgatggattatatgcgctcgatgctattcggaaacttacatgattattgggcagagaacaataaaggatatttcgtcatggatatgcgtgtcgggatgaaagtgacgaagaatatccatgtacaaggactggtgaacaacctcttaaacaagcgctatagcgcccgcccgatggatgtcggcgcaccccggactttcattctgcaagtaggagccaatttctaacaaattacctagttgtagagacggagcacgctccgtctctacaacatgtgatagtttttcaattcgcttcgtaaacgaatcgcttgattgttcgtcaccttatccattagtttccagaatctttcgctatggttcatctctatcgtatggcaaagctcatgcaataatacataatccaccaaatgccaaggaagaagcattaatgattgcgagaggttaatgctcttcttcattgtacaacttccccaatgcgttttgctattattgattttcaccccggtcaacataaatccatgttgcctagccaatagcgtgatacgttccggcaacaaccgtttcgcctcgtggcggagcgccttctccagcatggatttcaataaggattgcacctcttcctcctcgaaacgagtctcattcggacaagcgatatgcagtaccccatcctccaatctcatgtagaaattacttcgctcggtgcggaagatatgcaagcggaatgtcgtagcctgtaactccgatctttcgtcgagcaggggccgggccggatgcttctggagcgcttttaccagccgggccttgttctccatgataaaagcgatcatacgtttctcgtctcccccgggtggcatcgtggcggttatttttccttttgatatcttgagcgtgtatcgagtggcccggggagtggtacggagcgttatgactcccaaatccttgtcttgtatattcttttccattcctgccacaaaagtaatacattgagagaaacaataatacgatggaattgattatcttcgcgatcgtaaaggttaaaaacataatcaatataataaattagcaatcatgagcaaaaaagcacttttaattatctgtgatggttggggaattggtgacaaaggtaaagacgacgtgatctttaacacgccgactccatattgggacgagttattgaaaacttatccagcctcacagttacaggcttctggcgagaacgttggtttgcctgacggacaaatgggtaactctgaggtgggccacttgaacatcggtgctggccgtatcgtttaccaagatttggtgaagatcaacatcgcttgccgcgagaatacgatcatggagaacccggagatcaaacgtgcttatagctatgcgaaagagaataataagcagatccacttcatgggcttggtttccgatggtggtgtacatagctctttggagcatcttttgaagttgacggatatcgccaaggaatacggaatcagcaaggcttatgttcattgcttcatggatggtcgtgatacggacccgaagagtggtaaaggttttatcgaggagttggagaatcatctgaagactaccggcggtaagatcgcttctatcatcggacgttattacgctatggaccgtgacaaacgttgggaacgtgtgaaagaggcttacgacttattggtcgaaggcaagggcaagcaagccgagtgcatggtaaaagcgatggaagagtcgtacgccgagggtgtgacggacgagttcatcaagccgatcgttcacgttgagaacggaaagccggttgctgttatcgaggaaggcgatgtcgtgatcttcttcaactaccgtaacgaccgtgcgaaagagcttacggttgtattgactcagcaagatatgccggaggccggtatgcatacgatccctggcttgcaatatttctgtatgactccgtatgacgctagcttcaagggtgttcatatcttgttcgacaaagagaacgtaaataatacgctgggtgagttcttggcaaacgtaggtaagactcagttgcatatcgccgagacagagaaatacgctcacgtgactttcttcttcaacggtggccgtgagactccgttcgatagcgaggagcgtatcttggtcccttctcctaaagtggctacttacgacttaaaaccggaaatgagcgctttcgaggtgaaagataaattggtggatgctatcaatacgaagaaattcgatttcatcgtagtgaactacgccaacggtgatatggtaggccatacggggatctacaaagcgatcgagaaagcggttgtaacgatcgacgcttgcttgcacgatacggttgaggccgctaaagccaacgactatgaggtaatcatcattgctgaccatggtaatgcggatcacgccttgaacgaggatggcactccgaatacggctcattccttgaaccctgttccattcgtttatgtgacagccaacaaggacgctaaagtagaggatggtatcttggccgatgtggctccttcaatccttcatatcttgggcttgaaacagccgaaggagatgactggtaagtcattgattaaataagagctaggcgcatcttatgatccagatagatgacactttagtaagtcttgacgttattgagcgttattttttatgtgatctttccaaatgtaagggggagtgctgcgtggaaggagattccggcgctccattagaggattcggagttggcgaagctccagaaagtattacccatcatttgggatgatttatccccgaaagctcaagaggtcattcataagcaaggcgtagcttatatcgatgaggaaggcgatacggttacctctatcgtgaacggcaaagattgtgtctttacctgttacgacgccgatggtacttgtaaatgcgctatcgagaaagcataccgggaaggtaagacagatttctataagcctgtttcttgccatctttacccgatacgtgtcactcagtatcgggatttcaaggccgtgaactatcatcgctggagcgtttgtaaggcagcggagatcttaggaaagaaagagcaattgccggtttataagttcctcaaggagcccttgatccgtaagttcggccaggcttggtataaggccttggaagagtgtgcggaggaatggaaaaagcagcgtgaggagtagcttttaggtcgtttataaatataaaaaatcccttcagtctcttcctttgataactatacgttaaaaacggatggaggctgaagggattttgttttatagtcgctctatttcctcaagggaaaggccggtgcatttttggatgataagaggggttattccctcggctttcatattacgtgccgtagattctttccctttttgcagtccttcttgcaatccttcttgtaatcctttttgcaatcctttttccatgccttcttccatcccttttttcatgcctttctcaacggcgaagtccaaggtgttataataatcattatacatcttccactccgcctcgtactgcgctcgttgtttgggggtgaggttcgccatggatccgatgcgttccaaccgctcgaatatggccttgcgtgccttgaaaggcattctgtctaatgtatccatatgctttagtacataaatccaacgttcaaaatctgtctcgcattcttcctcctctttgttgaatcgaggaagctcaatatagatctggcggaacttggggttgaatacctgtccgttctcccggtccgccaatatgatgtcccttcggaatttaccctccttcccgtttttgtctggcccgttctcttcgtcgagcgtgaagttcaagaagaagacgccgtacacagccgccagctcatagtcccatgttccctttatcccctgttccaccaccgagtgcgagaggtagtataaggccctgtccttgaagtggggctgttccctgttctgcatctcgattatgatccgttcgcccttgtcggtctcgcaatggatatcgaagatgaccttccttccttgctctgtctcgggcaatcgctcattgttcatgatcctcaggtccatgatagtatactccccttcgaggaggtcattcaggaactcgattaaaatgtccttgtccatttccctgccgaatatgtgcttgaagccgaaatcggtgaaggggttgataaattttcccatagtgtttataggttttagtgattaataggatatagatggctcttttccatctttggcgataaagatacgatttttattatatggggcattcatttaggctttaaaaaaacacgtacgtctttttttcggaaatatcttgtgtagtttgagtgaagacgagatatagtgaacgcataaaggatacagccttaaagctaaaggtgggttaatgaggctttccgcgtcaaatgtaagccatagcttatttgaaaatacgggaaacatgtgcctgtacaggcccagataaccaagaaacgggccctctcattggctgttgaagtgaataactgacggcttgggaagtgaataactaatcacttggaaagcctttttataccggaaccaacaaggtcttctcagtggctttgggatgcggttcagttatcctgcggggcttttctatgtcgattattctgttatagccctcgcggatggatggtaagcgaagcggcgataatcatgacagtttgcgcgaaacaaggctgtttgtttgacatacctcttctttggagaagtctaaccagagagaagaaataggtgaaaagggcctttttgtctcttatttataggtaaaaggtcgcttttccggtgagaaaggtggtgtttgcccacgcgaatatatgcgttagccgacgcaaccgtatgttttagccgacataaccgtatgtattaggtgatacatacggtagtaatccctatcgcatacgatagaaatagccttcacatacggatgaattataggttttagccttaagaatatgaattaggatgaataattttcgccagaatgaaagggcgtattccgttatcttattatggaataactacttgcgaatattttttctcgttttacggaactatatgtataatctcccggaaaattcgattctcaagggctttaatttacaaagtgtcataatgacaatccgtaaattccggatgacttgtttaatataatattaatgtacgcctgtacattattaatgctatactataaaagttgatgaataatagattgaaatgatatctggagtatggaaacgactagtttaaacgaacgattcttttagtcatttgcaaaggtacgcgtttcttcgatacttgcaacccttccgggctatttttttactgcttattctctttcttatcaataggataggttatcctttacgaaacaagcgattccttcaacaaacctttctatttaccccttataaaacgcaagattaaaaccttcgtttaaactagtcgtttttgaatgacaaggcaatcgatacgataacgtaatgagctgattatcttaataaacactagtattaatattaattttagaattatgaacaaaaagttttctactcttttggctggtgctgcgcttctgggtgcggtgacggctaatggtgctgttaagctgaatcaaggagcgaataacggtctttatcagcttaaggcaggttctgctttcttgagtattaccgaaaattccacgactcacgaagatgaaatcaaaatggtttctcactcttccgcaaatttaggaggtacaatgtggtgtgtaacggttgatgccgagaatcaaggacagaatcctaagtatgatttcacgaacaagatcggaaagtttttaggtcttgagatcagcacgatcaaaggtaaggcggcggctccgttagctgctgtacctgctgttgtcggtggtgatctttccggttggaaattctctcctgtatttaagaatggtgtggagaaatccgttctctattcttatttcacgaatgactctgtaatcggtttgaaggtgaatactagtggcgatgtagaaatggttaaaactatagctactacagctggtattactgccgctggtttcactgaatttgagttggtagaggccgcttcgatcgttgtctcaggtgctgatgaattgaatacgatctttggtacccaagataagaaagctggtatcacattgaagtttactccggatgtattaggagatggagcggtaaactactttaccgagaagaagttcacggttgaagcttctggaactgctaattatttccatgtattgagagccgactcttcttacttgtacgtagatactgcttatacgaatgctgtgggtggagctaagttcttggcttataactggagcaacttaaaggatacttataagactggtactaagaatcatgctactccgaaagattctatcaatgctacagatttatcagaccaatataaatttatgtttacatattggccttcaaatgacagcttggagattcaggttaaacaatctttgttaaaaacaagtgagacgtattggaaagatgttactgctactacagctatgcaaaatcagcatatctctttgcaagagttgctgaaagacaaggttcgtatcttgacggtagatgcggctcaaaatactaagattgagttaggtttcgcaggttgcaaagttttgcctactacaaagacaactgttgatgatggtgtttatgtaatcagaaatgctaagactggtaagtactatgctgctccgctttataatgaatctgcatctagtaaatacgagtgggtgactttggatattcaagatgctactcatatgcctgcttatcaatgggttgtgttgaagaagaacgtaacagataagaataaggtttctgctgtagatttgtataaccgtgagtataatgacggtacggctgctgatgcgactctccaattgaataaaaatgcgggggctacttatatgtatgctgctagttttggtgactctttggaatttatcccagtcgctaaagaaatctatactgataagtatgtgggttataagcatctgactaatgatgagttgatcacgaacaaatatactttcaactactggcatccgtacgcatctgataaatttatcggtgttaaggattctacgatgaatgtgttagagggtaagaaagcgttcactcttaagtcttcttacaaagaacatgcttatggctataatccttctgaggaggtttccggtaatgcggacaagaagatcacgggtcgtatccctggcttggtgagaccggtaagaacgatgtatatcattactaatggtgagactactttccgtaatcataacgtagcggtagagtctaagtataaattgagtaagtattatcctaatactacgaatgactctgtttacttcaaggagaacaaccatattgagggtaaccattactatgctatccttgaggctacttccgcaggtgctatcagcactcataaagcaggtgtttccgattatgatgcttccgctactttgaaagctcagataatgggtgagactcgtacttccgcattcgctatcgctccggacgagactccgttgtatcgtcaattcaataatgaacttcttggtgagaacgttgataattcagctgatagcttgatgttcaaggaaactatccgtggtgaatatttgatggatgagcataatggtgccttgttgaacaaggatgttgattacgctggtatctggagtgagggtaaggctgatggtaagttggctttccgtattgacacagcatggttaactcgtggcgcaggtaaggttaaacctcaatacttggtatccgcttatcgtgagttgatcgagggtgagaagatcattccttgtactgagacaggcaagcatatcactgctgatggtcaagttacagaagatccatatcaatgtgtacatgctgttcatgtgaagactccggcattcatctatggtaagtatttggttaactactcagactctgctgccgctgttgctgctcgcaaggaagctcttaacccgtacttgttcaatacgaaagcagtttcaaacagtagctatactcgtgtaggtttcgttcctgccgttcaatatggtgataccttgatcgttttgacaggtaagtacaaagctatgactgctgatcaattgaagaatgagggaatcgagtctattatggctgtttataagaaagattatccaaaattcatcaacgtattgtctggagacaagcataagaacgtaacttggtcattccgttatgtaaatccggataaggctgctttagcttatgtagatggtaaagagggtgagaacaactcattcttgatcgagtctaacgtatatgcaacaggaacagatggtgataatcaatatcagactatcaagggtgatttggcaaaagctatcgctcctaatgaagctgccgcatggttgaagatgcacaatggctgcttggtattgacagatgctagctctacattcggtgccgctaagactggtggtgatggagcattggtattcaacgcatattctaagactgaagatgatgatatggtaacatctaacgataacatcaacaatgttgaaggtgtatctgtagtagctggtaacggtactgtaactgttcaaggcgctgctggtaagtcagtagttatcactaacatcttaggtaaggttgtcgctgagacagttcttacttcagacaacgcaactatcgctgtgcctgctggtatcgtagctgtagctgttgatggtgaagaggctgttaaggtagtcgtaaaataagactaaccgatggactaaacgaatagaggcggggagacccgcctttatgtaatatataattaaataactatgccacaaaataaagtatcccgtgacgggtgaacacgtggcatattaatactaaagtaattaaaagttcttccgcaggtatcctcgtgagaagagaaagcggatcaaaaaacaagccccgtgggatttatcctatggggcttttatttatcgtatcgccaccttgcgtaccgtatcgccaatgcggatgatataatatccctttgcgatatctacgacatattcggcggtggactgcttgacttcgatttctttcaccttgatgcctacgacactgtagatttccaagatactcccgacaggagcgttctctaccttgatgcgattctcgtaggccgtgatttcgataggagagggatcttcttgcctagaagcaaatgtcttgactcccgatttattagcttgtgcgtaaaccggataacttgcggagaatgcaagtgccaaagcgatgatatgtataagcttcatttacttgtccctaaattcgtacaaatgtagaaagttttccgcatattagaaagtaattagctttatttcgtaaaacggatgtatgattatacgctaagcctcataccttcctctcctaagatcgtgccgggaaatatcttgtctgcttctttctttaacggtgccatatcctcgtaacgagccgagtaatgaccgataaccaatcgcttcacttgggctttataagcaatctcggccgcttggcgggcggtagagtggaaggtctctttcgcacgtgcggcgtcacattcagcgaaagtcgcctcgtggtataataaatccaccccttcaatgatggggattatagatgggtgaaaagctgtatccgagcaataagcataccgtttgggagcgacggcagggcgggttaagcgggcattcgggattacctctccttccggggtgacgaaatcagcgccccttttgatctcttgcatcatacggacgggaacttgatagaaatctgtcatctcccggatgatatgcgcttctttggctttctcggcgaataaatagccacaacagggtatacggtgctttaacggaatggaataaacgcttaaggagcgatcttccataaccaacgaatgagttgtcgggtcgattaagttaaaacggatctcataaggcaaccctttgcaaaagatatcaagtaccggacgcatatagctctcgatctctttcggcccatgaataacaagttctccattacgtcccagcatacctaatgtagagatcaatcccggtagcccgaagcaatgatctccgtgtaagtgggagatgaagatatgatttaaacggctgaattttatacgcatacgacgcatttgcacttgcgtgccttccccgcagtcgatcatgtatagtttatctcgtaaatctactatttgagaggtcgccagatggcgtgtcgtgggcaatgcggaaccgcatcccaatatgtttatatcaaaatcagccatttgttgtctatgggaataattgagtgcaaagataatacaaaagcatttctgttctgtgaaaaataacaaaaaaacaaagtgtaatgtatgcaggatgaggtggattccatatatttgtttgctgtccttcgggaaagcgaatatacagtcggtaaatagacttaagatatttttttctaagccttaactaactttttctttttgtttaaaacggttaaatgtagaaacggccaagcgtgagcttcgccgtttcctttttttattgttaatttgaaatctaaatacctatatctaataaattatgtcatttaacaatctacgattatgaacaagaattttatctctgtttttcttctgatgctcgctatgggcgtatctgttatggcccagagttatgaggaagatttggcttttttcaaggaacgagtaaagactttaggctcggatgagttcggagggcgtaagcctttgaccgagtatgagacgaaaacaatccattacattgctgatgaatttaagaaactaggtcttcagcctgctaatggcgatagttatttccagccggtgaaggaaatatctacttttacccgtccggtaaagaataagatcacggtgaaatgcgcgaaaggctctatggatttgaagttctcggatgatattgtcgtttggacgaaccgggggactgaaaaggtagttattcctactacggattatgtgttctgtgggtttggtattaatgcgccggaatatggatggaacgattatgcgaatgtagacgtgaaggggaaaatcgttatcgctatggtgaatgatcccggtttttatgacgcgtctttgtttcgcggaaagaacatgacctattatggtcgttggacttataagttcgaggaggcgcaacgccaaggtgccgcaggtttattggtccttcataacgaggcggccgcttcgtatggttggaaggtctgtcaggcttctcacgtgcaaacaaatatcgctctttgctcggagacaatgaatgcggaagctttgggcatgaagggatggctctcggaggaggcttgcaagaaaatgttcgcccttagcggattgaattttgatgagacgattgccgcggcgaagaaaccgggtttcaagagttttacgatgaaggcgaagagtaaggttatattaaatgtaaagatgaccgtaggcgagtctcataacgtggcggctgttttaccgggcacggacctgaaagacgaatacttggtttttaccgctcactgggatcattttgggatcggcacgccgatagatggggacagtatctataatggcgctagcgataatgcttcgggcgtggcaaccttaatgttattagctaagaaatatcaatcattgcctgttcatccccgtcgttccatcgtattcgtggcggtgacttccgaggaatgtggcttattaggttctcagtactattgtgagcatcctttgttccctttatctaaaacggctattaacttgaactttgacggcacggctccgcgtgagcgtacccatgatatttctctccgggctgcgggtaagacggatacggatgccttggtgatcgctatggcctcggcacaaggacggaccgtgaaggttattaccgaagatcctgcgggtggttatttccgttccgatcattttaatttcgtgaaaaaaggcgtacctacgattttagttggtggcggtaaggattacgtggataaagcacgccatgaggctaaaccgaaagtttaccggtatcaccaaccgaatgatgagtatgatgaatcttggtgggattttgatggggctatggaagatatgaacttaatgtttagtattggtttagttatcgccaacaatgatgagatgcctaagtggacaaaagaggcggacttccaaaggcaatagattaatgtgccaatgtagcaatatgccaatatgctaatgtgtcaattaagatactatcacttgtattctcacttgacattgacatattggcacattggcatattatttaatttgcacattatttaataggtatgacctccttcttgcatttccttactattgatcttatgtagatcaagcgctctccaagcatagaaaatgtaggctaatacgaatggaacgagaatagatacatagctcattactttcaacgtgaatgggcttgagcaactattctggatcgtcaatgaactttgtagatccgccaaagatgggtagtaagccgtattattccatcctgcgcaaagtaataaagctaatacggtcaagacagtccctgctcccgcgaaccagatgccttttctccaagtcttcgagaatatcgttttccctatgccgaatagcacgccaaccacgccaatcaataatacggctaacacgattggcatctcgatcaggttcataaaatacttatacggttgcataaatacttctccggtatccggatttacggcaaaaccgtccaccaacaataaacggatcaagaatgtcaagaaaaagacgaggaacaagattgtctccggtatcaattgtttccggcttttagcgacaatctccggatcatcgatattgttgataaaatagagtagggccagagctcgtgccaagaagaaaactgccagtcctaggcacaaattccaaaataccaaagccgcctctaatccatgccaaggattggcccacgtggaaatgacgggcatggctacatcagtcaactgttctttgttaacaataaattcagcgccgttaaagaaggtcgctacagcggttccgagtaagatcggacctgctataccattgatcataagaaatacttgatacgtctttttcccgagtaggttgccttttttcgcttgatactcgtaagatacagcttgtatcacgaagcaaagcaagatcagcatccatacccaataggctccgccgaagcttgtggaataaaataaagggaaagaggcgaagaaagcacctccgaaagtgaccaacgtagtgaaagtaaactcccacttacgcccggtcgagttcaataacattttttgctgtatctccgtcttgccgatagtgaagagtagagattggcctccttgtacaaaaagaaggaatactaatagcgctccgagtagagataccagaaaccaccagtaatgttgtaacaatatatatgtactatccataggactttctatttaagaattgatatttgaaaattgaaaattagtgggcggcagcttccggccctttcttgatggccttaaccatgattccaatctctgcgatcagcaggatcgtaaataagataaggaacaggtagaaagtggtctgtaccgaggatgggtttaacttggatatcgaagcgctggtcggcaagatatcctgtatagcccaaggttgacgtcctacctccgctacgatccaaccggcttgtcccgctatatatcctaaaggtatagaccataggcccacgtattgcaaccaacgtgtattagcgattttcccttttttatcccatatcaacgtaataatgaatagtaagatgaagaaacaaccaaggatcaccatcacacggaaagaatagaatgtcaatcctacatgcgggattaactctgccggatccttaatataaccatatccgaaataggggaaattctcttccaaggttaccctgtattgtgcggctgctgcggtatctttatctttaaccgctttgcgataatcagctaacgctttgatggcggttttacctttctctattttttctttggcggagagcgctaccgttcctttattggtcgtataacctccctctattaagtttacgattcccggaacgtatgcattcatgtcacgttctgctaagaaggagaggagtttggggaacttaatgtcaaaaataaatgcgttctggttatccagataactcgtctttgccggatttaagatgccgatacctacgagtcctactccgttgccaccctcataaagaccttccatggcggctagtttcatcggctgcttttgagcgacttggtaagcggagccatcacccgtccagataataaggatggaggctaccaacccgaatatagcgctgaccttgatacttgacaaagcgaattcggtattccgtttctttaataaataccagcagctgattcctagtacgaacaaggcgcctacgatccaaccggacaataccgtatggaaaaacttattaatggcgacaggcgataaggctacggcccagaaatcgaacatctcgttacggaccgtatccggattgaaatgcataccgaccggatattgcatccatgcgttagcgatcaagatccagagagcggaaagagtagcgccgataatcgtcagccaagtggaggcgagatgaaagcgtttgctaaccttgtcccaaccaaaaaacataacagcgataaaggtagcttccataaagaaggcgagaattccctcgatagccaaaggtgccccgaagatatccccgacaaaccaactatagttagaccagttggttccgaactcgaactcgaggatcaatcccgtagcgacaccgatagcgaaattgataccgaataatttcatccaaaattgggcggtctttttccatgcctcattacctgtccgataataaatcgtctccataatagcttggataacgccaagtcctagtgttagtggcacgaagagccaatgatacatggcagtaagggcaaattgagccctcgaccaatcgatcaatgaagtgtcaatgttttcaatcatatttattaatgttttaaggatttattgcccgttgtatgagttcgttcgatacgtggttctccttctcactatcgctatcgaattgcccgagataattaggaaagaagaataatctcaggataaaaaacatgataaacaatttgactagaatgattagccaaagagtcttgcccagcttcatctcccggaatccttccagataaaagcgatatattcgtatgaatgcagattcttttttcatatagttgttctcatttaagataacagttgttaatatgaatatgttttcatgtttttacaaatatatccaaactgcgttaataaaatacccccaatcctatagataatatttatgaaattataaataagatctatcctgtctgttaaaaaaaactattttaaataagaaagcggtcttttgatcttgtcaataatacagcattggctatatttgcgacaatttgttgcctgtaaaggtgtaaagacacatgaaatatcattgttaagtgctaatctataaaaaattattactatgtctaacatttctagaagatcttttcttcaaaaaggtacggctgccgcagcagctttgactattgttccgagtgcggtcctaggtaaaacccatggtcatatcgctccaactgataaattgaatattgccggtgttggtatcggaggtatgggtaacgctaacttaaagaacatggagactaccgagaatatcgtagctctttgtgacatcgactggaagtactcaaaacctgtattcgaccgtcatcctcaagctaaaaaatactgggactatcgtaagatgtatgatgagatgggtaaatctattgacgctgtgttggtagctaccgctgaccatactcatgcgatgatcacagctgacgctatgacgcttggcaaacacgtatacactcagaaaccgttgactcactctgtttatgagtcccgtttgcttacgaacttggctaagaagtatgacgtagctactcagatgggtaaccaaggttcttcattggctgaaggtgtagatttgatctgtgaatggatttggaatggtgagatcggtgaggttactaaagtagaatgcgctaccaaccgtcctatctggccgcaaggtttgaacgctcctgagaaagttgataagattccttctacattgaattgggatttgtttacgggtcctgctaaattgagaccgtttaataagacatatcatccttggaactggcgcggatggtgggattatggtacaggtgcgttgggtgatatggcttgccacatcttacatccggtattcaaaggcttgaatttaggctatccgacaagagttcaaggttcttctacattgttattacaagactgtgctcctaacgctcagcatgttaagttggtattcccggctcgtgataatatgccaaaggtagctatgccggaggttgaagttcactggtatgatggtggtatgatgccggatcgtccagaaggattccctcaaggtaaggaattgatgggtgaaggtggtggattgtgtatcttccatggtacgaaagatacattgatctgcggttgctacggtgttaacccatggttgttatctggtcgtaaaccgaacgttcctcaaacattgcgccgcgtgaaagacgctatgaagggtggtcacgaacaagactggattcgtgcttgtaaggaaagcgcaggcagccgtgttcagacgaagtctaacttcttggaggctggtccgttcaatgaaatggttgtaatgggtgtattggctgttcgtttgcaaagattgaataaagaattgttgtgggatggccctaacatgagatttacgaatatcgatccgaatgagacaatcaagatcatcaagaaagatacattcgaggttatcgatggtgacccgaaattcaagacagagtggacggatccaattaatgctcaagaatttgccgcaggcttgatcaagcacaactaccgtgaaggctggaagttggtagatatgccgagataatagttttaactcaataaataaaatgaaaaagtcagtattattagcaagtgctgctatcatgatgtgttatttcacatcttgtggtggtggaaagaaaacagaagaagctcctgcagctgctgagactacaacagaagccgcaactcctgagtacaagctcatgacagatcttcctactgtagatatcacgactttcccgaaagataaagagggtagatatgtgatcttcgatggtaagacattcaatggctggagaggttatgaccgtgctgacgttccgggtgcttggacaatcgaggacggagcgatcaaaatcaatggctctggtgctggtgaggctggtgcttccaacggtggggacttgatcttcgctcataagttgggtaacttcgagcttgagttcgaatggaaagtaggtaaaggatctaactctggtgtattcatcatgattcaagaggtagagggacaaccttcttacatctctgctcctgagtaccaagtattggataacgagaaccaccccgacgctaagttaggtaaggatggcaaccgtaaatcttcttctttgtatgacatgattcctgctaaaccgcagaacgcaaaaccgttcggtgagtggaacaagggtaagatcatgtgctataagggtacagttgttcactatttgaatagcgatgaacctgttgttgagtatcacttgtggactccgcaatggaaagaaatgttggataatagcaaatttagcaaagacaaatggccgttggcttatgagttgttgttgaattgcggtggcgctaacaaagaaggtttcatcggatttcaagaccacggggatgatgtttggttccgtaacattactgttaaagttttggattaatcgtatcaagcacattttagcataaataacgcccgaggcctaaatctatgattttagcttcgggtgttgtgtttttaataatcgactttttctaaaccaattttttaggaccaagaaatgaaaatagaacaaggttacacgaaagcgcagatgacttggctgatgatgctgcgtctttttataggttggcactttatgtatgaaggcctagtaaaaatcatgaacccaaaatggacatctctaccctatctactcgattcaaagggtcccgctgcttcattttttatcaaattgactcaagacgacagtttgatgacaaccatcaacttcttgaatgagtgggctctgttattgatcggcctaggcttgactttaggctgtttgtatcgtttatcttctgttggaggtatgattcttctcgctctgtacacgttatcccacccctctttcgtgggagcgagctatatgatgccgtttgaaggctcttatttatggattgacaagaaccttgtggagttcgccgctttaggcttgatgtgcgtattccctacatcacaaatcataggattcgatcgtgtgttaggacgtgtgtgtccgatattgcataaacttaaatttatttgatacccatggcaacagaagatgcaaagaatactccttctcaggagcaaatgcccgataaaggacgtcgggacacattgaagacattggctacagtgcctatcttaggtgctttggcatatggcgtttaccaaaaaaggaaagacgctttaagaggccgtaacatatcagatgtatttcaggtaagtaacagacaggcctcctatttagagccgcaaggcgatggcaagaagatccgtatcggtttgataggcttcggtattcgtggaaagcaattgatgcgtgccgcaggtttcgctgagccttcttggatcgataagatgaaagaggctaataagttgaataagaaagacacgcgttatcaacaatatatggagcaagatgatctgaatatcgagataaccgctgtttgtgatatatttgatgtatatggtgaagccgcagtgttgaccggctccaatatccatcgtgagggtagcgacggtaagttcgggcctgctccgaagcgttaccggacttatcaagagctggtaacggctccggatgtggatgccgttattatcgctggtccggaccactggcatagcacgatcgctatggctgcggcacgtgccggaaagcatgtatattgcgagaaaccgttatcatggacggttcctgagacgtatatggttcgccaagtgatcaaagagaccggcgttgtatttcagttaggtcaccaaggacgtcagaccgattgctatcagaaggccgaggagattatcggtaacggattattaggccctgttaacttgatcgaggtttgtacgaaccgtaactctccaaatggtgcttgggtatatgatattatcgaaggctctaatccgaatacgattgattggaagcagttcgagggtgatcctgagcgtattaaggaatatatggattatatgacatccaataagcttgaaagatatatcggtccggacgagcgtagcaagtttagtctggaacgtttcttccgctggcgttgctggtgggattatagtacaggtctttccggtgacttgttgacacatgagtacgacgctgtcaaccagatcatgcatgtaggtatacctcattctgctacttcatccggtggtgtttatttcttcaaggacggacgtacggtacctgatgtattgcagactactttcgagtggccggatcgtgacttgacgatgttgtatagcgctacattggcaagtagccgtaaccgtggcaaggtgttcatggggcatgatgcttctatggaggtttccaatatcttggctattacggttgaccaagattccactcgttatgcggataagatcaaggaaggtattattcctacagataccccgttctatacctatgtaccgggacaaaatagctcggattccgttacatctcctacggagttgtattttgctaaacgtggtttgctgtatacgtatgtaaatggtaaacgttatgatacgactcacttgcatatccgtgagtggctagaatgtatccgtcaaggcaagactcctagttgtaatatcgacgccgcttttcaagaggctatgaccgctcatatgggtactcgcgcttatctggaaggacgtacgatgtattgggataaggacaaagaagagatcgtaagaggtgaacttgcgtaagtatctaaaaagacgataaataactttcccaagaagcgaacttcataaatggatggagttcgcttcttttatttgtgcatgtataaaatttcttctcttttttgtaaccgatttgtgattgctcatgtcttattgataaaagcgaataatttattaaacctttaaagaataaaagatatgaacgagttgtggattcctattttaggtgttatttgtgcggtaggtatgccggtattgttaggtattatcgctagttacatgaccattaaaagtaagcatgaggaaaagatggcgatgattgagaaaggaattgtgttggaagaggctatgcggcccgagagaaggcctaatcgttataataccctgcgtaacggtatttttatgatcggtttgtcattgggtgtgattgtcggtatgatggtcgactctgctttcacttacgatagcgattggttctttttgttagttccggctattacgattatgttcggtggagtagcttttataatttatttctttctttcccgttctttaatggagaaggagagattggaggacgagaagaaaatgcgtctggaagaataaacgataccggatggatgagcgaaagtggatagaacgtattttggcaggggacacgcaaagtttctcctgccttgtcgcgaagtatgagaagatggcttataccatcgctcttcgtatcttggaaaatcgcgaggaggcagaagaggctgtacaggatgcgttcgtgaagatgtatcgtgctctttccgattttcatttcgatagtaagttctcaacatggttttataggatcgtgtatcgtacggcgttgacggccttgagacaacagcgtatgttcgtgagttatgaggaggcgggccctgtagacctttcgaatgacgaagttgaatcggctacggctttattagagcgtgaggaccggaaagagatgatcgcacgtacgctgaaaaagcttccggctgatgaggccttgttgcttactctttattatttggaggaatgctcggtggaagagatctgtcagatcactgaattgagcgcttctaatgtgaaagtaaaactattccgtgggcggaaacggttttatgaagtgttgcaagataaaatgaaattagagacagctgatttgttatgaatatgaatgagaaagatattgatcatttgacacgtaagttgatgcgagggacggcggaacaaccttcggcctcattaaactcccgtattatggcattgattatgcaagagaagaaacgggtatataagtactatatcaagaagaggtttacgcctgtaggcatttttagcatgtttgtcgcttatatgcttgtgttagtaggcatcttgtatttggttaagctttctccgggcggggcggaaacggttttaggttctttgcgagcctatttcccgattgttttaacgattgcttccgggatctcttgtttcttcctgtttacacaactcgataactggttgaagagagaagagatacgccggcaaaacacctcaaaataaaaatatccggttgtagagacggggcacgccccgtctctacaactgattaattggccttgacttttagatttccgtaacgatttccttcgaagtgaatcgtcggttgctttccaccattaatctcataggtgtaattcttgtcacgatcctcatcgtcaaaatgcttgcgggtgatattgaaaccgttcacgtcgcagcttgaatacttcatgttctccgctactatccggaaagaagtttttgcgggaagcgctacctctaaattcccataatgggattctacgttcaccttcgagaaagagggagacaagttccgtatctttaagttactatagctaaggctacttacattcaatgcatccttaagggtcccgattttagcgtcgctgtacttaatctccatgtctagtctgcttacgctttcaatggtgagattaccatatttaatctccatgcgtaaagattgtatatcctgtatatccagattggaatatttgctgtctatcgttaaatctttagcgttgcgaatcttggcggttcctacgtagcccagatccagttgggcgtcctgcagatttcctacctcgatgttaccatatttggcctctatcattgcgttggctgtgaaattacccgcattcaggttgccgtattttacatggatatccatgttgccgttattatcgcttggcaagttgatgtttccgtatttctggttcaagtctgcggcgagcttaggaggcatctggatataataattgatcgtcatggactcattattcgaattgctattcatctccttctttatcgtagtgaccgctgagacaataccacctatcttcttggtctcgatttggatacggtccaagttctcttgagcacgttcctcgctgcgagccttacattctacctcaacccgtatagctaccgtattctgattccagtgggtaacggtgatgtttccataacggttttctacttggagacgatcaccggcgcttacgctgtaggattgggatatctcttttttcttgatcttctcttgtggcctagctattgccgatagattgcatagcagcaatacgaaagtcagcaatacggcgggactcaattttacgtgtgtcgtgttcatgattgatatgtattaattgttattactatttctggttatccgtgacttgttccatttgcttaagcatcagcgtgaggccctccaagctattgctgtaatgttgggtcatggcgaaaagaccgtcgttggaacaaggcaaggtagggagtatcgtttcctcgaacatataattatccgtgaggatccgtttgctctcttgcaataactcctccgctcccggtgtccggtcctgtttatacaacttcttcatttgcgccaatacgtcgttcatttgcatattgtaatataggcgtagttcctcgatctcctcttgggtctcgcaggtctgggccgtggtcttttgcgcgggttccggcagaccggtccctcccggcaagcggaataagagcaacaaagcgatagaggcagctatggcaaagaccgaaaggctgtataaggccgcacggttcttccgtggcttcggcagcttttgctcgaaacgttcgaagtggccttcgggaagtatctcatcttcctcgaatgcgtcacggttcgcgtctatgaaattctttagtttatccatgtttaattggctgctataatgtctaacaatttccgcttggcgcgtaggtactggctacggacgcttggcggttgaattttcaggatagaggcgatctcttccatatcatatccctcaaagaggtaaagcgagaggattatgcggtagcctgccggcaacttcttggtagcttcctttatctgtgccacggaatattggatttcttcctcgtccggtccgtccgtttccggttcggccagattgtcggaaagctcctcttggtccggtgcttggcggcgtacataatcgatggccgtatggatggcgatgcgatgcatccatgcctcaaagcattgcccgtcatgatattggtccaagcgtgtgaagatcttgaggaacgagtcctgcatggcttcttccgcctcggatgagttgcctacgatacgcaagcaggctatatacaatcgctgtgcgtattgtttgtacaacttcagttgcgagctccggtctccccggcggcaaccctcgatcagatgttcggttactttgtccatttgtttatataaacgagagtgatgccttgaccgttgcatcttgtagcgtaaaaatacaaaaaaaagaaaggcatcatctcgacgcctctcctcctgaactaaatgataaaaataaaagttatgtgggaaggtttatttcatgtctgttatattggagatactatcgttcgtatagccttgcgaagtatcctccattttggtcttatccgaattatattttaatttataagcctgttttccttcggaagtccaatagtttacgacaagatcgaccgtctctcctttggtatccggcaaggaagacaaattgaacgccacacgtccggccccgatcgtatattggggatcatcgtaagcgttatgcctaaactccagcgtataaggatcattctcggcatccggttggatcaggttgataaagtgggcggtcttgcctccccagagtgtctcgaaatagatattcaaatatccgtctccgatccacatattattgttataaatacttaccgggtccgtaccatagatagaatcattagccgctccctcgttcttagcgatggatttcgtaaggatgttatggatcgcattcaccttgatatagtgggagaaacctcctaggttactttgggtggaatccgccaatatcgtgaagttaaccaaggcacgttggttaggcttcggctgatagttcggatagttcgtggcggcgggccatagcttatccccgtcatccagccgtaagtaatatacgttattgccttccggtactacggtagcgaccgctatccagatatcacctaaagaatacgagttatcgtcatctaagcaagagggtagggtgagggatactaaagcgatcccgataaccaataaaaaagctctcaacgtcttcattccttttgtttcttaaaaagttcacatttcatcgttctatgaagaaagatgtaagttcggggtgaaatgctgcaaaagacgttaataaaagatgttaagaaccaagggattcaacgattagccgtgccgtacgctttgaagccccgggcattcctagcgtatggataatcttgtcgtatccgtctagcattcgttttcgataggctggatcttgtaggatgcgtcctagctcgtcttgtatttgcgattcggagaagcgggctccgaatagttcttgtacgatctcccgtcccccgatcaggttcacgagggatatgtatttcgtatggaagaaatgcttgaaaataaagctggccaactgtccggctacgacgtagtagcaaacgacttgcggaacccggaacagggcggtttccaaggttgccgtgccggaggttaccaaggcggcggcactatgttgtagcaagggataggttttaccaaacacgatcttggcaggataagagcctatgtattcttgatagtaggcaggatcgatgcctggtgctccggctattaccggctggtagtcgggatatgcggaggctactttcagcatggtcggtaaattatccttgatctcttgtttgcggctaccggatagcaaggcgaggataggcttgttggccaatccttcctctttgataaatgtatctttggggatcgcttgatgctccttgtaataggctacggagtctacagaaggatttcctacgtaatctaccgaataattaagcttccggaaaaactcggtctcgaacggcaggatgcagaacatacgatctacataacgccggaagtccctgatgcggtattgtttccaggcccatatcttgggggatatatagtaatataccgggagacccaattgggttttcacatatttggcgatcttcaggttgaatcccgggtagtcaattaagatgacgacatctggttgatagcggcggatatcctcttggcacgtcttcatgttatttaagatggtgcgcaagttcagcaataccgggataaagcccatgaacgccatttcccggtaatgtttgacaagggttcctccgacggctctcatcagatcgccgcccagaaagcggaactcggccttcgggtcattctctttcagggctgccatcaaattcgaggcgtgcaggtctccggaggcttctccggctatcaggtaatacttcatgaattgaaaattgagaattgagaattaaaggatccagttgtttagggtggccatgaagtcgtagtccgtaacgtcaatcttgcaggggactagggaggcgtatccgctgtccagcgcaagcatatcattgtccgggtggatgggtttggcgctttcgaaagctcctgtcaaccagaatacgggctctccgctggcgttctcggaacgcttgaattcacgtacccaacggccatccgcttggcgacaaactttcaaccctttcacttgcggtagcttcggcacgttgaggtttaagtaggttccgtgcggtaagccttcttttaatacccggcgtgccagcatacgtccaagacggcagcattcggagaagtcggcatcggccgcatggtccagtaaggatacacccatggaagggacgttgaaaatacatccctcggcggcggcacccatcgttccggaataatttacgcagatagccatattccccccgtggttgataccggagactaacagatcgggcttgcgctccaaaacctcattaatcgctaatttaacgcaatcaaccggtgtcccggtgcaactatagatggtaagtccttcctcctttttcaacaaggtatacttgataggaactaaagatgtaatggcactacccatcccggaacgaggtccatcgggagcgaataccaccaaatcgcctagatctttcaggcactcaatcaattcgttaatacctttggcccatacgccatcatcattcgtaatcagaatcaacggtctctcgtttgtcatatcgttttatccttatagttgtcgtacaaaggtaacaataatttgcgaacaatggttggggtgtgagggatgggagttgtcctttcgcctaatcagttgttgatcaagcgaaaggtctcagattattatagtttctctatttcttctatggagaggccggtggcaaaggcgatttgctctatactaactcctaatttcttaagattaagtgctatggagtgtttctcttcctgtcgtccttctgcttttccttctgcttttcctttttgcaaaccttcttgcaatcctttttccatcccttttttcatgcctttctcgacggcgaagtccaaggtgttgtaataatcattatacatcttccactccgcctcgtactgcgcccgttgtttgggggtgaggttcgccatggatccgatgcgttccaaccgctcgaatatggccttgcgtgccttgaatggcattctgtctaatgtgtccatatgctttagtacataaatccaacgttcaaaatcggtctcgcattcttcctcctctttgttgaatcggggaagctcaatatagatctggcggaacttggggttgaatacctgtccgttctctcggtccgctagcacgatgtcccttcggaactttccttcgttcctgttattgtttggcctgttctcctcgtctagcgggaagttcaagaaaaaaacaccgtacacggccgccagctcatagtcccatgttccctttatcccctgttccaccaccgagtgcgagaggtaatacaaggccctgtccttgaagtggggctgttccctgttctgcatctcgattatgatccgttcgcccttgtcggtctcgcaatgaatgtcaaagatgactttccttccttgctctgtctcgggcaatcgctcattgttcatgattctcaagtccatgatcgtatgctccccttcgaggaggtcgttcaggaactcgattagtatgtccttgtccatttccctaccgaatatgtgcttgaagccgaaatcggtgaagggattgataaattttcccatagtgtttataggttttagtgattaataatgaataatagtataatgagacggggcatcctgtcttccggttgtaaagatactacttttttaataggataggcatcgttttagcttttaagaaaacacgtacgagttttttcggaaacacgtacatgtttttcgaaaaactcgtacgtgttttttgagaagcataatgtaactacttcaaataccggatcagccgataaatcgtggggataattttcctgaatgtatattccaccaagggatagtatggctaggcactacatgatctgatcatttcacattcgtgaagagatcttttcacctacgtgatacaatcgtttcgcataggtgaaaagattgtatcacaaccgtgaaacgatttcatgggcagatagagcaagctactgccgataatgtttgtattaaatagaaaggctcaacggtaacaactcttcgtaggcatctctgcgctccctttcacatccttcacaacatatcactgacataaagcaagttggccgacgtgaaacgtgtgataaacaaattgaagtgtagataaaagtacattgcgagattatcctcactatttatcgggtgagcctgaaaaagtcgattctccgggagttaagaatacaaaatgtcaaagtgttactttgatatagatatacaatgtacgcatgtacattagtatatgatagtaaaatttgtatgattaataaatgcttttctagtatagaaacgactagtttaaacgatcgattcttttagtcatttgcaaaggtacgcgtttcttcggtacttgcaacccttccagacgatttttttatcgcttattctctttcttatcaataggataggttatccttcacgaaacaagcgattccttcaacgaacctcccgtttcgacgctcaaaaaacgcaagatttagacgatcgtttagactagtcgtttttaatggcaaacgacgattttcaattagtctaacaggttgattatcttaataaacactagtattaatattaatttatttattatgaacaaaaagatttctacgcttcttgccggtgtaatgctggcatctgcgttctctgtcaatgctgcgatggagaatggcaaatcttatttgctgaagagcggaagtagttatttgtccgctaagacagataagacttctgctgattatggcaaacttgtgtacggctcacttaacactagcgatttgagtgaagttgttgccggtacttggaaagtttcaacaaagactacttctggagctgttgtctacaccttcgtaaataaggtgacaggaatgacattggctgttgatcctactttggcgaaaaccgcgaccaacggtctttctggtgatgtgacattaggcagtggtacggtttctgaatgggcattcgatgctagtaaccacatgtattcttacttcaaatcggactcaatcgttttctttgataatacgggtgccctgaacaaaggtaagattgcggacttgtctgctgctttggctgttacagaagatgtaataagcactcctattccaataagtgcagatgatttaaatacattgatgtggtctgttgattctaaagacaattattttgcgttgaatatggaccctgaagtgtcaaaaggcaaggcgaatcatttgacagcgacaggacttcaagcggttagtgctggtagtggttatgttcaattgaaagctaaggacaaaaaggcggatgacaaacaattgtatgtagttgtcgatacggcttattatgaaggaactgagactagcggtcagttgttgaaatatacctatgacgtattaaacgcagacaatcgcttgactggttcttataagttcaagttcacttataatgtgaaagaagacaaactctatgttcaagtagcggaagttgcggataaattagtgaaagcatcgggtcaaactgacgagcagtttgcgaaggatatcaaagacaataataataattcttattggtctaatcaaggaaaaactgtaacgacaagatctgacaagtacatctacatggctaaattggacggtacgaatgtgttgacactgaatacgaatgagacggatggtggtactcctacctttgcttcacagaatattacggttaagacttctgctgactatagtagccttacattaactacgattccttctggtgtatacttgatccagtataaggctggtggttcttacaatacagaaaaggtaggttcttatgtattcgctaatttggctggttatttcggttgggctgctcaagctcgtaaccaagagttcaagcatatgccggctgctcaatgggtagtagagaagaaaggtacatcttctattgcgccgatctcaattacgaaccgtgagttctctgatgatagctataagacttcttatcaaattccttctgatatgcaattattcgcagtagagggtagtgctaatgaggtattctattttaatggaaaccaaaaggatacggttagctttattaaagttgacgaggatcttgtaaaggatgctaaactgggatataagtatgtatcagaaaatgaagctaaggttcaaacttatctgtttaactatttgcatggattggcattagataaatatcttaatgttccgtcagggaaggattctattgtacgtgtagatgagactggagctaaagcaagtttccgcttacaagtggttgttaaagacgataagtatggttatggcgatggtttggtaagaaatgtttaccgtatcacggacggaaaaggccgttatttgacttatgacgggacaacgaagaagtatatgatgaagacttatcctactgattatttcttgaaagagaataatgatatcgaaggaaaagaatattatactttggttgaggctaatttgcttaatacatctatgacacaggtgcaagcacaggcatggtatccagaatggtgtaagggtatggctgtcgcagatgcaatgactatcgaggagcaatatactccggagggaggatctgctacttatgtgactgttggcggaacctcttatttggcttatccgggttcttctgatattgttgctgtagcgatgtatgataaagacggccaacgattggtagatgataatagtaaggtagactactatacttatcagaatgttaatggtaagattgcgttgaagaaagtaggagctgctcaatatgcctctagaaattacgcttcagtgaaggtctctgttgacgacaacacgttggatttgactcgtggctctttggatgataaattctatagcaatgaagagattcgtacatctgcttttgccgtagcaatggatgattctcctttgtatcgtcgcttcaacaacgccgctctaggtgagaatgtaaatgacggtcctgatagcttgacattcgttgagagcgttcgtaatgagtacttaatggatgagtggaacccgaacttgactacggaaactgttgattacgctggtatctggaataaggataaggctgagggtaaattagcgttccgtattgatacggcttggttgaatcgtggtcttggaaatatcaaacctcaatatttgatctctgtggctcgtgacgaccaagagggtgttgagacagttccttgtacagaggctggtcctcacgttgacgctaacggtaacattacaacagatccttctaagtgtgttcatgctcaacatggtcgtgctggctttgcttatggcaaatacttggttaacttctcagactctgcccaagcgttcatcgatagagaggctaaggttaatccttatatgttcacaacgaattctagtgctaatagcagctatacccgtgtaggttttgttaaggctatccatgctggtgacagcttgttcgtattgacaaatggtttcgagaatgtagaaccggctaagttagatacggcgacaatcatcgctaactataagaaagctaagctggaaaacttcatcgtagacttggttggtgacaaacataagaatgtaacttggtcattccgttatattaacccggataaggctggtgccgtaacagaagaaggtgcagagaacgcattcttgttcgagtctaatgtttatggcgagaaagatcaaaattatagaaccgtaaatggtgacgctgatcgtgctatcgctccgacatatgctgccgcatggttgaaaatgcataatggttgtttggtactgacagatatcaattcacagttctcttccgcaaagaccaatggtgatggcgcattaatctttaatgtcgctcagaaggatgaagaagatatggttacatctaatgataacatcaacaatgttgaaggtgtatctgtagtagctggtaatggtactgtaactatccaaggcgccgctggtaaatcagtagttatctctaacatcttaggtaaggtagtcgctgagacggttcttacatctgataacgcaacaattaccgtacctgccggtatcgtagctgtagctgttgatggtgaggaagctgttaaagtggttgttaaataattaaacaaatagataggtcaagagatggggattcccccatctcttcctttaagaagatatttataattctgaaattcccgtgtggagatagattcttcaagtacaccgcgatggtagaacatgcgggagtattaatactaaagtaataaattaaaagctcaggtcacgagaacttctgtgaagaaatgtcgtgacctttttttgtactcttaaatctcgtgctatgcttatatctactcaagaaacattgatctataaatcaattagtccggaagacatttattgttatactcccggaatcaccgtgacttcgacgggacgcttggtcgtgactttcgacttgggcggcaagggggtaaaagaaatctatgcttcttcgcagctgtatacggaaaggacaagacggttaggtatcggtaagatttttgtatcggacgaccaaggcgctagttggtgttttatctcggattttaatttttggcatgcccgccctttttgtataggggaaaagatatatatcataggaaacgcaggcgatttatgtattatatgctcggaagatgatgggaatacgtggagcgttccctcgtttctctcccaaggtgagaaatggcattcttctgcctgtaatgttcttttcgctaacgagcgggtttacttggcgatggaacagcgtttttataactcggagatagaaggctggaatgtggcgggtttgagccctaccttgctatcttgctctattcacgatgatttactggatgcgtcttcttggcgacgttccgatccttttgttttcagggataaagtacatttcccggaaggggttggcattcctttttacgagtcattgaccaataagccgctagaattggctcccggtcgttttaatgcgcccactggatggctggaggctcaagtggttcaaataaaggataaacatcatatttggtatgatccggaggggaaaacgttccatatgtttcttcgtgcgcataccggagggattggatacgcttgtttattaaaagtgagggaagataagaacggccagatggtaaccggctttcaagagactccttccggacagaccttgcttttcttgccctttcccggtggtcatttgaaattctttatagtgtatgatgagatatcccggttgtattggatggcatccaatcaatctttcgattctatgcggacgataagctcattacctgagacttcccggtatggactcccgaataatgagaggcatcgtttacaattattattctcgaagaattgtgtggactggtgtatggctgggatgatcgcttgccaagggaatgaattatattcaagaaattatccttcgttatgtatcgtaggtgaggatatgcacgtggtttgccgtgcggcggatgatcatacaaaggaccctcaatactctgattgtattacatattataaaattaaacggtttagaatgttaatctattaaatgaagtgattatggaaaaagtactgattgtaataccggctcgatatggttcaagccggttgccgggtaagcctttggttaagattaaaggtatagagatgataaaacgggtctcggatatagcggattttgtatgtcgcaaaaatgagtcttgttcttatttggtagctacggatgatgagcgcatcgtctcgttttgcgaatcccgggagattccggtgatgatgacttccacgaattgtaaaagtggtacggaacgttgctatgaggcggcaaggaaacaggacaccaatcccggactgataataaatctgcaaggcgataatcccacgtgtcctccttggatcttgcaagatctgatcgatacatggagaaaggagaaggcggatgtccttaccgcctcggtcttgttgggatggagcgaatacgatcaattactggcgatgaaaaaggaaaccccttattctggcacgacggtattggtggatcggctgggatatgccttagctttctcgaaacaaaccatacccgctatccgtaaggaggatcaggctagggatcttttgcctaaaagccctgtcaggcggcatgtgggtttatatgcgtatagcggtcgagcccttgagtcttatttctcattacctccgtctgtgtatgaacgctcttatatagaaggattggaacagatgcgtttcttagagaatggtatcaaaatgagggtcgtagacgttgattatcggggacgtgagacaacaagcggggttgattccccggaagatgttaaacgggttgaggaaatacttgagaaatatggagagttcgatctttcgtgacttagatggaatcgtagattctattttatttccttaccatactttggaggaagttctacctcctggctgtgaggctggtccggtatggatggaatttgcctgttgggtagacagccaaaaggtggatatacgggcatcggaatcacccttattcttgaatatatgtggtatacccgcatccggtaaatcgtattgggcggtgaaatggctatcagagaatggaccttgtttgcatatcgctttcgacgctatcatggaggcattatccgggtatcaagcggattactcgctagatagggagaaagcgttcttacgttgggaacttcctgctcgttttttaggttaccgtcttcttttgttgggattgaggaatgggtggcctattttatttgaacatagtaatgcgttgagagaacatgtggatttgtataagaagataaagagtcttggatatcggattcatatggtgtgcatcgatgcgacaccagaaatggttatcaaaagattggctcggaggaatcgttttttcccggaggagcaagtaaaaaaacgttgggattgcttgatagatttgttacctgaatatcaaaaaatagtagatgactttaaattaatacaaccatggaaaaatgtagaaaacttgtgatcgtacggcatggtaatacgtttcgtgcgggagagactccgactcgggttggagctagaactgatttgcctctggtagaggaggaacgagctagatctgcgggacgttatttacgtgaaaaggggattgtgatcgacaaggtgatttcggcccccttaaaacgcacattggagaccgctaactatatcttggaggaaatgaatgtggatttgcctatcattcaagacttacgtcttaaagagattgattatgggccggatgagaatatggtagaagatcatgtaataaaacgtttgggatctctctatttagaaaaggagggaatggaccggaaagacctaacggaagatcggatcgtggagagtggactttccgtgatcgcccaatggaatgagaaggccgtggtaccgttaggatggaacgtagatgtagagaaactgataagcggttggcaggatttggcggctagtatacctgatggtgagacttggctgctagtatcttccaatggagtgatgcgtttctccccctatattctggggaattatgaggatttctgtgcgactcatgatattaaggttccgacaggtggggtttgtatattcgattgtgtgggtgatcattggaggtgtacggattggggaataaaggcttataaactttttaaatgataaatcatggaagatatatggaatataacagctttggtagttagtgtattaagtgtgcttttgtctctttatgctttaagacaggctaccactaaaaatacctcggatatgtatctgttctttatctcgcaatatgcgaaggaggacatgaaattggctttacgtaaattgaaagatataaagcggggggtatatcggttggaacaatgggagagtgatatgaaaaataatttgccgaaagcctttgagtatgacgaggcgagacgtttggtgaaatatttttatgatactttagcctatatgaagttggagaaactaatagaggctcgtttcgtaagattgatttgcttgaagaaaggggcatggctttatctggacacagtcgaagccatggaaaaattttttgacagtggctatgataaaaagccatatgcggttattcgggatgtatgcgaaaatttacgaaaggaagggtgttgtcctccttagttcattattttcggcttttggtgatttaataaagccttgatcgaagaaacgatcggggcttttatatttatttcttaattcgccatgacgatattccgcaagtcgaaaccgaattgaatatactcatcctcagtgatttgcctctctgttgtcaggatgattaacgcatgccctcgatagttgtttctgtaagggggatggaaatggttgtaacggttttcgaagaagccgcattttttatagaactttaatcgcttggaggaaatttcatccgtaataggatcgatctctaataagatgatcttattcaggcgtttattaaaatcctccagcaataaaccgccgtatccttgtcccctaaagttctcatgaatggcgaaatgttcgatatatacataggtgctaaaatcccagtatgagataaagccgataaagaggttatctttcagataagccactagatgatagttgggagattggaaggcctgttcttgttgttcttctgttcgttgctcaaatagagggaaacttgccgtatatatttgctcaaaggtaggatagagaggatcttgctttcgcattatttctagtatgtccatatgacttcgctttattttgatgcgaagataataatctaaaaacattgtcatgtcatattaaagctttatttttggatgatcttataattaagatattgtatacgatgatagcgtggtttcgttatatatgtttaattgttagccttataatcactatgccggaattactttcggcacaacgtctggtttctcaacgtcaagaggatgtagaggccggtcttttatataacgagagcgtctacatcctatctaattattcttgtctatcctccaattccccggaaaaactttctttggacgagttgttgcggaagcagatcgaaggcttttatttctatttgaagcgggatacggagacaaatgtattgttactaaggaaacctgatggtacgtttaccccttttagtgagtcattggaagccattaagacggccttggatgcggactccactaaggttatgacgcttttccttgatttctatgtagagacggagctggaatcctcttttaaggaaataggcttgatggagtatgtacttgagtatgatacgaaaaacggatggccatccctgaaggatatgttgagttccggaaagcgactggtcgttttcgaggttcagaaacatttgaacagtccttcatggttgcataatatgagggatttcgtggagcatacggacgctgattggggcaaccaaccggaaggggttgagagttttgatgagcggctgaaaaagaatttgtctttatttaccggatataagttcttggagacttcccgggggaatagcaatgatatctcggctttagcccggcagacgccctatttaattgaatcgtttaaaagagcgtggatccgggatggaagggttcccaattttatcttggtagataagtattacgcgtggttggatgtctcgttggttacttttcggaatttcgatatcatctacggcgcagttacgaataacaatgagctgcttaactacgtgaattgggatgggatgtctaattatacgacgggtaaatattgctttccgctagagcccggggccgagttgatgctctccccgatctctccgggctataggatagagccggctacggtttatgtctccggtacccaaaggaaggctttcgctagcgattttaaggctagacctttgcggattgacgaggatatagagatttatttaccgtttgagggtgatgagaaagatggttcgtccaatcataatctcacggtatctaggaatgtcgagtttattcaggaccctatacggggacaggtcgcttccttggagaatcaggcccgtgtggatttaccgaccgcttcggaacttcatatgcgggatcatgatttcactgtcggcgtttggttgaaaatacctaagtacctgccggagaaggaggattattgtattctgggagctaagaacagtacttatcaacaagcgttgcatctgttgatacggaaccggaaaccgtatatgggattctttaacaacgatctggttggtaacacggagatcgagccgggcaaatggtacaatgtcgtatggcggtataataaaaggaatggggagcaggctatattcgtgaatggaaaactggacgcgatctcttttgatcgtccggcttatctgggtagtgatagcttatatgtcggtttcgtgaatttcagccagttctcgaatttcgtgggtgtgctggataatctttgtatttggtctcgtgtgttgagcgataaggagatattgggattgagcaaccagttattagatttacatatatcgaatgcgattacttggttggatatccttggaattgggttgattttgatggctttggtctcgatagcttatctaggctatcggaaggtgaaagaaaaaccaaggcaggatgaggctgatgcgggaacggtcgcggaggagggaatcgaggaaggaatcgaggagccggatcgtccttcgcgagagatgccggaggagattgaggaggttccggttctgcgcaattatatccgattgtttggagagttctatgtgttggaccgggatggaaatgatataacctctctatttaccccaaaattaaaacagctgtttatcttgattatgcttcactcttcccgtggaggtttcgggatatcgagcaaggacttgacacggatgatttgggggaatgacaacccctcgaaaagtacgaagagccttcgaagcgtatctatattgaaactccggaagatattggaacgtatcgatacggtcgaggttctatttaatgcgaatcgatatattctccagctttcggaagatgtctattgcgattatttggcttgtttggattggctgaaagataaacgggtacggactcagccggactttgaatatttctatgatattatcagcaaaggaaaagtgttcaaaggggaatcgtttgattggatggatgattttaaaagttatatctgtaatagtacggtggatgtcttgtctcgctttatcgacacttactcgatcgaggatgaggcggatcgggtgatccagatagcagaccagatccttctgaacgatccttgcaacgaggaggctttgctctataagatcaaagccttgatttaccagaacaactttaaattggcccgttatgtgtacgaccgcttttgcgctttataccaagagatgtatggcgaggctttcccctcttcttttgagcaggtcgtaccgtctccgctgatgagtcagcaatctccccagtaagtattatagtgtgcctgctcattggcaggactgtgccattgctattgtcacacctgtgccatcgttgtggcaagaccgtgccaccgttatggcatgcctgtgccatccgtgtggcactcctctgccattacagtggcaaatgtatgcgccccactgatagcgatcctttcgaatagagaggcaggtgctatgcctctgacttatcgaagatttttataaatatttcttgatttatttatgtcgctgttattgcgtgaattatgctttgtgaggatatgaaatttgccttaaattagccctaggttaatgccttgtttagcgttcgttaactcatggtttgctgctcctccctatattcgctctcgttgtttcgcacgaggaagcgaagttgtgttttactatatatatttttttttcgactttaaatttaatactatgagtaacactatgtctgacaagaattcggtgaacttcacacgtagggagttcttaggtacagtagctgcagcggcggcgtttacaatcgtacctcgttccgttttgggtggaccgggctatacggcacctagcgatatggtcaatttggccggtatcggtgtgggtagccaaggtggtggcgatatacagaatatcgctactccggatgtaccaattaaaaggagaccttttggtggaggcggtatgctgatgcaaccttatgcgggcatccagccacccagacgggaacgaagagcgtcggataatcctgtgcaaatgggagatgcggagaaacaatcgtttaagcatgcgaatatttatgcgctatgtgatgtagaccacgattactccggacatatcttagcgggatacccgaaagcgaagaagtataccgatttccgggaaatgatcgacaaggagaaagagatcgatgcggtattgatcggtactccggaccacacccatgcggttattgccgcttatgcgatgaaagctggtaagcatgtatttgtagagaagccgatggctaagacgatttatgagacccgttttttgagggatctggcaaagcaaaccggtgttgttacccagatgggtaaccaagggcataatattgaaggaactatgcagacggtcgaatggatccaaggtggcgtgatcggagacgtaagggaagttcatttgtggacaaaccgtccgatgtggcgccaaggttattttgatcgtccggcgggagtggatataccgtctaatcttaactatgacgtgtggttgggaccggctcctgataaaccttataatccggagatgcttcatttcgcttggcgtggattatgggattacggtacaggcgctatgggggatatgggagcccataccttcgacgctccgatttgggcgcttaatttgggtatgcccacaaaaatacaagctacttccaccccttacaataaggactatctgccacaatcggaatgcgtgacgtatgagttcccggctcgtgggaatatgcctccggtaaaggtaacttggagtgatgggggtataaaaccggctcgtccggcggagttggaagcgaaccgccagttaagggaagcgctttatataggcgataaaggcctgatcatgcatggtacccatggagcggagccgcaactgataccggaaagaccggggttcgtagctccggagaagacattaaagcgaccgagtaatatttatgtggactttatcgaggcgataaaggaaggtcgcaaagccgctaatgattttgaggtatccgctaaattgacggagattatgttgctgacgaatatcgctgtcgccgcgcaacggttggatcttacgttggaatatgacgcagagaatatgagaatcacgaattgtccggaagcgaacgattatttccactatgagtatcgtaaaggttggagcctgtaagggactttcttctaagggttaagattaatttataaattgaatggttatgaataaagatgtgaacaatggtcagtccagacgtgagtttctaggaagatcggtcgctgctttggcggccgcgtctttccttccgagtgctttctcttgtacggggaagagtgtggcggctcccgctccggttgatacggcggcggaggcaggcaaggttaactcgaagttcggtggcgtgcaaatcggcacgatcacttatagttggcgttccatgccgggtggattggagaatatcatcaagtattgccaagaagcgaatatcagttccattgagttgatgggaggtgatctggaagcttatttaggagctccggagaatccgatgatgaaattcttccgtcggcaagcttctcaacctgcggcgaaaccgggtgagaaacctgcggctcctcgtcggatgggtcccccgaagtttactccggagcagcaggctgagatcgataaatataaggaagaggtgaaagcgtggcgtctcgggctggatctatcgaaggtggaaggtgcccgtaagttgttgagcgacgctgggatatctgtgcatatcgtgaaaatgcaaccttccggcatgggatcggacgaagaggtcgattatgccttcaaggtggccaaggccatgggcgctaaagccgtgacggacgagattaatttggagacggcgaaaagagtcgctccatttgccgagaagcatgggatgtatatggctttccataatcatatgcaatatgccgaagaaggctttagttgcgatccgatcttagcgatctctccttctattatgttgaattttgatgcgggccacttctttggctctacaggtatccatccgaatgagatgatcaagaaatatcatgatcggatctatagtatccacttgaaagataagacggggcctacgacaggggaccagccgaatacgaatcaagtatggggacaaggggagatgccgttggaagacgtgctcttgttgatcaaacaagagaaatggcctatctattgcgatatagaactggaatatgatatcaagccttggtctgactccgtgaaagaggtaggcacttgcgtgaaatatgctcgacagatattgatgtagattatagaatgttgtctttggtatgtcattaatgggatgacgaaaaggtcggttcccggtggagccgaccctttattttttatttattgatctctttcagcaaatttggtgcgcacttaaaatggacaatggttctagggatcaacattaaagtctctccgcttttcgggtttctagccaacctgcttgtctgtaagcggggagtataaacaccgaaaccctgtatacataccttttctccggctctcgttttctctaagatgatgttattcagttcttccaatatgtaccggatttctgctttgtcattaccgactcttttcgataattcctcgattagctgacttttattcatatcgtattattttttgagaagtttgttctttgctctgttgttaaatattttttcctgtattgcaaaggcgataagcccgtgtgcctccgaaagaagcgtcccaacgaggattggttcgagaactgcgtcttctcaacaatctcttggatattcaaggtggagttggtgagtaatccttttaattctaggatcatatattccgtaatccaatctttggcggatttgccgcttacctccttaacaaccatggtcaagtatttaggggtgatgcatagagagttcgcgtagaacgtcacgcttctgttcactttgtaattactcatgaccaattgaaagaatttgtgggtcagttctttcttgtgtacatctatcgttgccgtactgtctaaagaattgactttataatggttatatatatcaaggaataatatgcgaagtaagagtataaccgactctcttcgatactggttttccggatcgacggcttttcttataagtaattcaaagaagtctacaaaggaaagagtttccacgtcttccatcttgaaatagtaatgttgcctcatatagaaaaagaaatgtggcgagaaacgactgataccgcttaatatatcagaataaaaggattccgtgatcgtgaaatatctgatttggaaatctacgctaacgtccgttaatgcgaccaattgccccggcaagatgatgatgagctctttgggggttataatgtgcttgttggaatagatatcaattttagcgtttccttttacacaatagatgacaatccctaatcttatataagaagggtaagtggtaatagggagttctttggaaagtgtaaagatcttgaagtccttctccaaagaataatcaataccactattcggctcaactatttttttaatatttcccgacattctttttgtctatgtttcttatgtaaaattataacttcgtcttttactatatttatctagtggttgtttggtataatattacagaaatataggtctcgttttggcgttttttaaagtttggcttaaatgataccttgaaaaataaccgctattggatgtttttgtttgtaggtctaatacttttttgcaaatacggttgaggtgatgttagggataacttgtattctaagggctgtgcgagctggatggaatatgtgttaggaaatattagtaattaaggttaaggacaagcgtgcgagacaagaacgggaaggattgcctcgcacgacaggcttagatcgtcttttagataaacttgagtatatcttctgccttttccgctatatgatcgggtacgtatttctctaattccgtacgagggcgaaagccccatgttaccccacaggaggtcacttcgctgttgatggcggtttgcatgtctacgtccgaatcaccgacataaagagtgctctctttggatatgctcgctcgttctacgatctcattgacaatactgggatctggcttcgcctttactccttcacgctgtccgagaacctccgtaaattttatggaaggaaagaaatgggcgatgagcttacgggtagcggcttgatatttattagaagcgaccgccagttttatccctctttcctgcaacaaggctaataactcagggataccggggtagggaacgctgcgatccgtgttatgcagatcgtagtgcttcaagaactcttctcttacctttagtatattctcttccgtcttttcaccttcgggtaatgcgcgttcgaataatttgttgatgccgtttcctacgaagaagttatactcctttacgtcgtgcgtcggaaaaccgttttgccgcaacgcatggttcgtgctatgggctaaatcggcgatcgtatttaataatgttccgtcaagatcgaatattactaactttttcattttagttttctggcaaaattaatggaatgtagagacatactttccctttcgactgataaaatagatgaaccgatttaaaaatagataaaagtattaggtcatatataagatatttgtatctttaggacaggaatagaaatcctttgtaatatattgtataacctaaaattggaacatcatgggaaagaatcaattaattcacgggaatgaatttcatttgctgaaacaagcagagattcataaagctacaggcaaattagtcgagtcactaaacttggcagccggttctacgggaggttttgatatttataaagttgtagaggcttattttacggatttagagaaaagaaaggagatcaatgatttgttgggtatttccgagccatgtgagacacgtgtcacggaagaatgcttttcttaaataagccgcagtaggaataacatagaaaaaggagatacctgaatcagatatctccttttattatatctcaaagaaggatcaattacttaccagaaagtttttctttcaaagctgccaattcctctatgtcacctaatgtagtcttttcaaccggaccggttaccattccagattcctcttcttttttaccgccacgttttgaggatgccttcttttcagaagttgccttagcgcctttttgctcatcttcaaagatgcggctgtgagaaaggatgatacgtttagcttccttgttgaactcgattaccttgaatgaaagtttctcatctacttgagcttgagaaccatcttcttttacaagatgcttcggagtagcgaaaccttctacgccgtaaggcaaagagataacggcacccttatccaatacttcgatgattgtaccttcgtggatagaaccaaccgtgaagattgtctcgaatacatcccaaggattctcttccaattgcttgtggcctaagcttaagcgacggttttccttatcgatttccaatacttgaacctcgatctcagcgccgatctgagtgaattcagacggatgtttgatcttcttcgtccaagacaagtcagagatgtggatcaagccgtcaacaccttcctcgatttctacgaatacaccgaagttagtgaagttacgaaccttagccgcatgacgagaacctaccgggaagcgctcctcgatgttttcccaaggatcagccttcaattgcttgataccaagagacatcttacgctcgtcacggtccaaagtcaagattacggcttcgatctcgtcgccaaccttcatgaagtcttgagcggaacgcaagtgctgtgtccaagacatctctgaaacgtggatcaaaccttctacgcccggagcgatctcgatgaacgcaccgtagtcagccataacgacaactttacccttaaccttgtcaccaaccttcaagttcgtatccaaagcatcccatgggtgcggagtcaattgcttcaagccaagagcgatacgtttcttctcgtcgtcgaagtccaagataacaacattgatcttctgatcaagctgaacgatttcttccggatgagaaacacgtccccaagaaaggtctgtgatgtggatcaaaccgtctacgccacccaagtcgatgaatacaccgtaagaagtgatgttcttgacagttccttccaatacctgtcctttctccaatttggagatgatatctttcttctgttgttccaactcagcctcgataagagccttgtgagatacaacaacattcttgaattcttgattgatcttaacaatcttgaattccatagtcttacctacaaatacatcgtagtcgcggatcggcttcacatcgatctgagaacccggcaagaacgcttcgataccgaatacgtcaacgatcataccgcccttcgtacgacatttgatgtaacctttgataatttcgtctttttcaagagcctcgttaacacgatcccaagaacgtgtagcgcgtgctttcttgtgtgaaaggatcaattgtccttttttgtcttcttggctctcgatgtaaacctctacctcgtcaccaatctttaaatccgggttataacggaactcggacataggaacaacaccgtcagatttgaaaccgatgtttacaacaacctcacgtttgttcatagaagtaacggtacccataaccacttctttgtcttttaccgtgttcagggtctcgtcatacgtttttacaagatcgtccttgcttacttcggtgtaagtctcgccttgctcgaaagcgtcccagttgaaatcttcaactggctggatgttttttaaattttccattctttaattgttaatactaagtttgttttaattagtaagttagactttatgttgtcatctctcaaaaatcggggcaaaggtaatgctttttttctgattgacaagagttttgaggggtaaaaacattcatttgggtcgtgttggctgtaattacggaaaactgttgatttttattgatatttattttgtaagtttgcgaattgtaagcgataaatcaatgagtagaggatttttaagaaagtccagcgtcaatacttttataggaatagtgtggattttgtttgcggtgggcacaagtgcgcagaatgccgtgagtaaatttcgtgcggatagcatacgccaatctttatcacgtatccaaaaacctcaggataagataccccttcttaaagaattaatcggcttgtactggcaattgccggaggaggtactagcgttgaaagagataatcgatatcgcgatgcctttggattccatcgggatcgtatacgatgcgatggctggcttgagtcgttattaccctgctattaggacgtttgtccgagtcgggggcgctcttgaaacagtatgatcatttattggattccttggaaaggaagtataatggggagggaaagatttttccggtaaaacgtcatcgttgcttgatgagttgctattattgcgagctgtataccatgaaagggaattcgggaaaggcacaggcgtatttggatcaggcgaccgcttatttggatagttcttttggggatagggtggaggctcaatatctgcggacaaaatcattttattattggaaggagaaagattataggcatgcgttgtccgccgtcaatctggctttaaagatcaatcgtgatctggataagttggagatgaagaaagcgatattgcaatcgtccggccaattgcaagaggcggtcactatctatgaggagatcatcaataagacggagacgatcaacacggatgccttcgaccggcaaatcgagcaactccgtgtattgaatgacttgaatgacctggaaaagcaagatcgggagttgaagctgaaatcggagcaagaagctttgaagcagaagcagattgtcgtatctatcggtcttctattggtcttgatgggcctactctatatgttgtggcgtatttatatgcatactaagcggttgagaaatgagttgcttcaggagaaagactccttgaccgcttcggagaagcaactgcgggtcgtgacgaaagaggcggaggcggcgaacaagaaaaaaagcgcctttatcgccaatatcagccatgaggtgcgtacgccgttgaacgccattgtcgggttctcggaattattggcgagtagcgagtatagcgaggaggagaagatccggtttgccggggaggtgaaccatagttccgagttgctattgaatctggtgaacgatgtcctggatttatcccgtttggaatccggcaagatcaagttcagcgtgaagccaaacgatctggtcgcctgttgccagagggcgttggattcgattcgccatcgggtgaagcccggggtccgattgacgtttactccctcgattgaatcttataccttgaatacggatgccttgcgtttacagcagttgctgactaacttgttgtcgaatgccgctaaattcacctccgagggagagatcaatctctcgtttaccgtggatgagggcaaggaggaggtccgtttctccgttacggatacgggctgcgggatcccggaggataagtgcgaaaagatattcgagcgttttgagaaactggacgactttattcaaggtaccggcctaggactatctgtttgccagatcatctcggagcagcttaatggctctttatcggtggacatctcttataaggatggagcccggtttgtctttatacatccaacgaatttaattgagacccccatatgagactgaagaatcgactcaataactggatatccatacgtatggggatggtcatcgtgatcttcctaggcgtatcttgcggttcgatgagatcttccacacctcctcccgccaaggatcgtttaacggagatcgacagcttggagaggttattgccggactgcccgacaatagcgtctaccttgcccttattgcggcggttggcattcctgtaccagcagcaatccgagatgaaggtttataatgaacgtctttatgaaaatgcgatggcggtggattctatatctgtcgcatacttgggattgaagaacttagccgaatattattacgatcagtctgtacgtgatagtttggaatattattgttctctcgtagactccatagccaaggcccggcatgaatacccgaatgtgttgtttgacgtgaagagcctttccagccaagatctcctttggcttgggaattatgagctggcgatgagcgaagctatggatctgtatcggttggcgagcaacttggatcatagatatggcttgctccgttgctcggagacattaggattgatttaccaacgaatccggagggatagcgacgctgttgtctcttttcaggaaagccttgatttattgaaggatataaagaatgtgccggatatcatggatactaaggtccggttaacttcttatcaattggagagtagcgtacggacgaagcaatatgcgtcgacggaacggatcttagggcaatataaggctttgctcgatgagtagtataagatctaccaagagaaaaacgatcttttgtctattaaaagagaatattggttactttattctttttacacgagtttttatctttcgcaaggagacttggagaatgccaagcgttcgttggatcaagcctcttcttatgcggatagtaattgggttgagggagattatgcgatcaatacctacctgacggttaaggcccgttatcataaggcggcaggagacattccgctggcgcttcattgtataaatgaagtgctggagaccgagcggctgcccgaggatatccagttcaaggcggatatcttgaaggaacagggacaacttggggaggtcatggctctatatgacgaactttatagtacgctgacgaaaaggcggggaacttcttttctccggcaggtaaaccaattgcgtaccttgcatgagctgcatgaaaaggagttgaaagaaacggaattgaaggaggccgggcaacgcatcgcccggaaacaggatctgctgatctttatcctatccatatcggtcgtgctgttgatccttctctatgtcctgtttttgtactaccgtcatctacgatccttgaagaaccagttgcagcgggagaaagagttgcttttggaatctcaaagacagttgataaaggaaaagacccgtgcggaagaggctagcttgatgaaaagcgctttccttgcgaatatgagccacgaggtccggactccgttaaatgctatcgtggggttctccggtttattggtggaaccttctaccgatgaggaggagcggaaggaatattcgtctatcatccggaacaacacggatctgatgttgaatctggtaaacgacgtattggacttatcccggatggagaccggagaccttcattttgacatcaaggatcatctgcttttagtatgttgccaaatggctttggagagtgtacgccatcggataccggatggggttaaattgactttttctcccgccggggaaccaatcgtggtacatgtagataatctgcgcctgcaacaactgttgacaaacctgttgacaaacgccgctaaatttacggagaaaggcgagattaatctatcgtttcaacttgagccggaccggaagaaggtatgtatagccgttacggatacgggtgccggaatcccccttgaaaaacaggctaccatattcaaccgctttgagaagctggacgattacaagcccggcgtgggtttggggctctctatctgtctcctgatcaccgagcggctggacggcgccttgtttatcgactcttcgtatacagacggggctcgcttcgtgcttatcctttcttgtgaaatagattcctcaatttataatccgccaatagaagtatgagcgtgatggcccctatgtataaatagaaagccaaggccgatgtgcttatcgtggggatggctatcttgggtatctccatatatacgaaagatacgatcgcgagggaaatcatgataagcgaggccacgatcgccgctaacaggctgaaccgttcgtcacgtttcttcgcctttgcggactcaagcatgatttgtcgcattacgttcgaacggaacgaggcgggaagctcctcctccggtatgcgtttgaataaatcccccaataaatcgggttgttccttatttgtgtttatcttactcatgatccattccatttaataatacaaacaatttttttcggatgcgatgtagcttgactttaatattcgaggcggtcaagccggtgatagagaccagttcttctattgttttttctttccaataaaagagcaagatcaaggcccgttcgtccggtagaagttgttcaagggcgacttccaatctttgaacctgttccgtggattcggtttgtccgaacaggttcgtaatttcctcctccgatacgttttcaagtgtagtctcctcaatcgctagaaactcatatctcttcttccggaccgacgagatcgccgtgttgtaagcgatccggtaaatccatgtggagaaactgcaatcccctttgaatgaggcgaggtttttgaataccttcataaacgtatcttgcgccaactcctcagcctcctcttggcttcgtaccactttgaggatcaacgagtgaatcggacggctatacttgtccaaaaggcaagcggaacatgccacgtcccccgcttgtatcctttgtatgtaatatgtatcggtatacaattccattgtacttaatggacgcaagccgggtaaataggttacaacttgcggtaacaaaaataaaaaatatttttcagcccggaggtgtaacctatgggaaactgttgcgtcaaattagcaaacaatatgaatgaatcaattaaaattatacagttatgatggattttatttctgttccgctagttgtcggaatcgtttgtgcaggtatttacggattatttgagttgtttgttcgcaagagggaacgtttggcgattatcgagaagatcggtgataaactggatgcctctgctttcgatggtaaattgggactgcctaactacatgcgaaacttctcgttcagtagcttaaaggccgggtgccttttggcgggaatcggattaggtttgttggtaggctttattattaatatgtgtatggcgacaaattcttattatgatgatggttggtacaggcatgaggtagcgggtacggcttatggggcttcggttcttttgttcgggggaatcggcttgataatagcgttcgtcattgagctgaaactaggtaagaataataaatagccataggcttgcctgtatagacgtagcgtgctgcatgcagcacgctacgtctatactacaggtagatctccccgaagaattcaggacaatggaaattaggctcgggaaggtcgatcggactccaacttacgaaatgcggattcattgtttcatcggcgcatttatagaagttccctagtattttctccggcagattactaggatctaaccccatcaacttgagtggtatgactacgatcaagttccatgtatgaatacctttaatctcctcgaatgcccttcttctcacggatgggagtcttatgatgcttttatactcttcttgcgaaagcgacgtcttgatatcccgtgaggtacggcgggcggcatcgcaagtcccgatacaattaaactcgaaattcatataatgcgagtcaccttcctttttcatgaagaattccacgcaactatccttatggaccgaggaattgtccatctcataagacgcctttagcgaattaccctgcacgctatatcgtatatatagatttttctctgtccgggctatattaaaagcggtgatcggcttatatggatactcatgccaattggcatgggtgaggaactcacgttgggattgcacctcaagaatcggttctatggatgttatatcgagtacatccagaacggggataacaggaactttcagtcttttcattttaactatagatttgaagtaaaggccattgtaagtaggaggtcaataaaaccgatagggcaccgataatagacaatacgataatgacagagcccacgatccggttcagtaaccaaatacctctaacgttgaaccattttctcagttttccaataatatatgttatgccgaaccaccaaagaacggcccctaaccctatgcaaacaatgcccaataccagcagccaaaacgaatgttcaggcagcacgaaaccaaaccgggcgaataatcctatatagagcaagacgattaacacgttgctaaaggtaagtagaaaagctgtaataaagtcttgggtgaacgataattttttttctcggtgtttctttaggttcctagtcgggttgctttggaagatataatacccgaaaatgccgagaacgatacttccgatcaattgcaggggcgcttggttcgcctccacgaagttgaccacaactcccatgcccagacaagtcagtgccgcataaatcacgtcggatagagcggcccctaatccggtgacgaacccgtgccaacgtcctttatttagtgttctttgtatacagagcataccgatggggcccatgggggccgaaaccaatacacctataatgattcctttactaacgattcctagcattaagttgagtctcttctagtttctcgggcaaagatacatccattccgcgataaaaaaaaggtaaaaaacgtaagatactgtagggacgaggctcgctcgtcccttatttcgggaaattgggactgtacaatagggtcgtatcgagagtcatcaatttaccgtctttcacgaatgaatctcctcgctcggacagatgctctaccatcatcttgcgtagttcggacaacttattctgataggctgcgtcctcactaaggttatgtgtctctcccgggttttcccgtaaatcgaacaactgctcgcttccgttgtggaaattccagatatacttaatcttcccatcggtaagggctgcccagtaattatcgtcgctatagcaagtggcatgctccatgtctatataggggcgccattgttcctgctggccttggatcagcttgagtaaagaccgcccgtccatatcgggaggaaccgacccgccggcgatatcgataaaggtaggcaagaagtctctcagttctacaggttgttctatgctgcttccgtccggtatggatttggatataccggcgggccattttacgatataaggaatatgggccgaaccctcgtacggataggttttccgccaatgataatgatcgcccaacatatcaccatgatccgccgtgaaacaaatcagggcattgtcgtacatacctttgtcttttagggtctggatgatttgccctacttgatcgtcgataaaggtgatattggcgtaataatggcgacgggagtttatggcatacgcatccccgaaattaccgaatggggcatccgatgctccttggagaggatctttcggctcggcgtattgtccgcaccaatctcctatatggggtttcgggatatctgcgtccttatacatatccagataacgttgaggcggatcataaggactatgcgggcgggcgaatgataccttgaggaataagggcttgtcgttgtcgtagttccggatcaactcgcaagcggtctgtccggtccaagccgtaggatgaagccgttcgtctaacttatagacaccggcggcatggtcgttccagccgatacccgtaagatccgggtctttgccgggtgcctgcaattgaaaccattcccggtaatcgctgatgaaatcgggactttccacccggccactctcgtcgatcaaggtcgcgtggaatccgtgaagtgctttctgcggaaaccaatgcatcttaccgatcccgaaggtataataccccagattccgcatcatctgaggcatctcgtaacgatacttcaaggccatgcgtccgtatcccagcataccatgatgccaaggagacatcccggtcaataaaccggcccgtcccggagtactacttggagcggaggaatatccgctcacgaacaacgagccttcttgcgccagccggtcgatattcggtgagatcaccgccttgtttcccatgcagccgagggcgtcgccccgttgttgatcggtcatgatcaagatgatatgcggcttaccgctctttacgggcatggcgggagagacggcggtctctgcctctttcccgcttttgctatgcgtcatccccggaagtgtcgcacccagaccgattccgagggatgatttaatgaagtttcttctttccattatttagccttgatagtgtgatcccgaactccttttaagattccctgcaattggaaaacgatctccggatgttgcaaggccttgtttccttcctcgtagaccttcgtcatgtcgtataactgaggctcgggggaatatccggtctcaatcttctcatattccatgatagcggaacctacgctcggctcgatatatttccaatctttcgtacggacggagagtgccttattaagcgcttgctcgattacccacgggcggtcttccttgcttttcccgatccaagtatccagataatcatagctatccggcgcgcttccttccggaagacgggaattcgtcagtgaggcaagggaggcgaaccagtcgatctggctcactagcgcatctgatacggcggcttgcttgatctcctttggccaatgtacgatagccgggatacgggttcccccttcgaaggcactgtatttattacctctaagcggtccggcgggtttatgatcgcctaatagctccacggcccggtccgcgtaaccatcgtctacgacaggtccgttgtcgcttgacaagatgatcaaggtgttttccgtcaatcccatctcatccaatgttttcatcaattggcctacgctccagtcgaattgctcgatagcgtcgcccctcacgcccatcgggttctttccccggaaacggtcgtgcgggaagcggggtacatgcacgtcgttcgtggcgaaatacatgaagaaaggcttctctttattctccttgataaaatcgatggcgtgtgtcacgatagaatcggcgatattctcgtctttccaaagcgccttgccgccacctttcatgtaaccgatacggctgattccgtttacgatggattggtcgtgcccgaaactaggcttctggttgtataataattccggattatcttttccggtcggctctccgggaaagttcttctggtaactgacatagatcggggtgtccggatcgtagttcgccacctgcccgttctcgatgaatacgcaggggacgcggtctgccgtcgccgccatgatataggaataatcaaatcccagatcgccaagggcggtggggagtggggcgttccagtcttgctctcccgctttgtctcctaggccaagatgccatttgccgatagcggccgtggcgtatcccgcgttcttgaacatatcggctatcgtataacgctccggtcgtatgatcattccggcgtttcccgcggcgatgtccgttcccgggcggcgccatgcgtactctccggttagcatggaatatcgggagggcgtactggtagaagcggtcgcgtgagcattggtgaagcggatgccgttcttggcgagtcggttgatattcggggttttcacttgcgtgccgtcgtagcattccaagtctccatatcccaagtcatccgcgtagatgaacaatacgtttggcgttctaggtgtaatgtcttgtctctgttgggcttttgcgataccggctgtaagaagcgaggcaccgatccctacgataagtgttgatttcatgttgtttattatttagatgttctataaagagtttgtattatgactctatttcgttatcaaaatcaagaaggttatctgtctggtatttatcaaaatcggattggaatagacggtcttgaatgatacggtatttctcaaatcttttcttatcaacgacatagccgcgaatggcaaacttgtaatatttagttgcgtagcttttgccatcggaagcagttcgtcggaatttccgacagactgagtcttcttgtaattcttggctttgaaatatattttgtagatgttccgtgatagtggaacggcttttatcgaacaatacggcaatagcatcctgcgtcagccaaaggctttcgtcttgatataagacttctataccttcttctttattttctatttggaaaataaagaattcagccgtgctgttgtgtatctgcaatttcttattcatggcatgttctatggacattaattatatacaaaaataaccaaattatttcagaatcagggtaactacaccaaaatatctatgagatggagcttaggaagaaatgctttttggctctggttaaaaggggggcttatcgtatattttcatgtacgctcttgctccttatcgaatgatgctgtaaaaagtcgtacgtgtttcccgaaaaacatgtacgactttttacagaaacacgtacgtgtttttcaaaaatcacaatcgtgtttttaaggtgttgatattaaacaatttatatatttgtgccatttgtataccttattgtatattattattaccaagacggaacacgcactgcctatacaagagtgggtaatattgatattgaagggtatgcacatgacatgggattcacttcctacccaagtggatgccagcaaacattcttgtaaatgaagaaaagttcggagagtgagttcggagacactgcggataagcctaaaaatataggtagaacagcacagaagatcatcgaccttgtcatttccgacctttctatgtcagccgaagctatggcttataaaattaggtataagttcccgtgctgtagaaaaacaaatcgcaaaattgcgttctatgggtatattgtctcgtgaaggcgcagactttggtggttattggcgtattattttaagttaccattttgaggggatgagacgcagcacgctgcgtctctacaactggagacaaaattgggcgaaaaaagtaagttagcttgctttggaagtgaggtattggagtttgaaaatcaaataaaatattatacatttgcatgactggataagtcaaagcgaataattggtatcaaacaatgataaactaaaaaacatatggattatcttaggttgaaatattattaatacgtatatttgcgacaagaaaaggctttttaattaagagcctcgtgttgcgtgtgatatttgtgctgtaggacgaaaatcggctaattttcttaaatctccctatgcacgaagaaggccccgcaaccctttactggatatacgtgttatctatgctaatatagtatggatatattttgtatacagataaagggggcgtgtggctgactttattgggagttgggtcttagccgaaccttcgtctacataaatgttcagtcctcgcccttcctttattttataagaaaggaccactacttaacaaaagccatatagcgctcgtctttacgaaggacatcttttctaaaacatgtccggatcttgtaaatctaataattaatcatgtaaagtgaatggcttatggacgcttgtaatattgatgagatccagaatctctttatttactactccgcttgtttcagcaagtattttccagagttagggttttattgtaatgagagggaattccagatacatggtatcgtgcggagatatagtgacattacgggagtgtcccatgatggctcttatttcttaattgagatgcgaaaagaatacctgatctacttaccgttattggtcggttccaaattccgcattttaactaaacaaaaacaactttattcgtaatacaatcttatgcttatgccagaactcatatccatagaagaagccgcccgtattaccggtttcccgtacgaggagattgaagattgggtaaaatctcgaaagataacctctttccatacgagaaccggtacacgtatggtagatcctgagaacctacgtgatttcattgcccatatcgaacatctagggattcaaaaactatacttgcaactggtcattcaagacaaggaggaggaagccgacgagattatcgcccagtacgacgattaccttttctgcctacgatccttaaagaacatctctcccctacttaaacaaatcatcgccgaactatccacatttatagatgataagcaagatcggtatatattcacggaaataacctctggggcaaaaatactggacgtagccaaacgctgcgatatatcttacgataggatgtgctaccgatataagaacatagtactccgcttgcaggaaaacaccggattcttagccgaatataagaaaacgatcagctgtcaagacctagagatagagcgcctgcggcttgagaagcgaaacatggaatatgagctgagaacgctctataaagcagtcctcaaaagtggcttgagtctcgatgctccgaaatcgtcgttcgacatccccacggatgcggccagacggatctccctaccggtcacaagcctaaccctgtctccctacatccgtaaatgcctccaaaaattggagctggaaactatggaggacctattgcgctacgctaggaagaaagggctcgattctttgttgaagatcccgggattcggccctctcggtttagaccagttaaaatttcagctggaaaagcataagatcatgaataaggccggagactcggatctctatcaatacatcatcaatgaaccggatagctgaacacaaaaagagcctctcttcacagggaggccctttttatgtgatgccggaaataaccaataaaaacttcccgacactacggtgttaatcatcttatatgcttacataaaattagcagaaggctttggtttgcgatatactaatagtgttacattctttttgacattgcaaagatacgtcggcctataagggtgcgcaatacctatatatatgtaaaaaaggagagctcatacctattaattgttatatatcttttcatggagatcgatttttagaactaatgatcttctcgcttgtaataactaacgcttacctctgaaataatacaaaaccgtattttccaaaattaactatcaagttgtcttgcgggtcaataatggggcctattgggtgtgacgtcctgaaaatattcttccgggatacctatgagtaggtaattagggtctcattttacctacttcgggcgattgtagcaaattctcagcccctgtaattttgccaaaaattataaaacgcaatgagaacgttaacaaatttattagcgattggattactttcctttaccgctctacatgctcaagagagtaatatgagctctaccgtaaaggcatcggagatgtatgccgacggtttttctaaattccgttttggaggatatggtgagatggctgccagttatatggattatgactggaattgggtgacacctcaaggtacatcacatatgaatcgggctactgtctctatccctcgttttattttagcttttgattataagttctctcccaaatgggtactgagttccgagattgagtttgagtatggaggaacaggcgccgcacgggaagtggagtggtacgaggagaatggagaatatgagaccgagatcgagaaaggtggcgaggtcgccttggagcagttccatatctcttatctgatgaacaagcatttaaacttccgttttggacatatgatcgtaccggtaggcttgaccaacgcacatcatgaacccttgaacttttttggtgtatatcgtccggaaggagagactaccatattaccttctacttggcatgagacgggtgtggctctatttggtgatttaggaaatttcgattacgagttacaagtcgtttccggtctggacccacaaggtttccgtatggagaactgggttggcaaaggtacgcaaggcgctttcgaggaaactcaatttacgcatcctgcctttgtggctcgtgtcaactataatggagtgaagaaatttaaaggcttacgtgtgggcgcttctttttattataaccaaccctctaagaatagtagcaaaccgctgcgtaaccaaggtgagaaatatccgcttaccatcgtgacggcggacgctcaatataaaagtccgaacaataatttgatcgccagaggtaatatcgtttacggccatctgggcaacagcaacgctttgacgaaggtaaacaataactcatcttcagcttccggatatcctaattcaaccgtggcggagaccgctgtcagttatgcggctgaggttggctataatgtaggttccttctttagccggaaagcccctagaatttatcctttcgttcgctacgaatattataatccgatgcaatccgtagaaaaaggcagtaataaactggcggatagacgtcttcaaaagagcgtgattacggcaggccttaactattacgcgttgcctaatctggtcgtaaaggcggattatgcgcaccgtattgtaggtaagggtgattataatagccagaatatggtttctgtcggtatcgcttatatcggctggttcttatcaagataatagactattaacaaatatatatgtaagaatatgaaaaaagtacttttattacccatgatgttgatgggtgtggctttgagcttcacttcttgtggagacgacgatgatccgggtaaggaccccgatgttgtaacttatgactttaagaatcttcctgcggattcgggtacgaaaccaacagaagatcagatgagtgcggttgtcgctactttcgttgatgaggtagctttgcctacctataaagacatgttgacaaagatgactgcctataaaaatgcggtagacaagtttatcgcgtctggttctaagaatgatttagcggatgcctgcgacgcttggcgtgcggttcgtgtgccttgggaacaaagtgaggcattcttgttcggtgtggcggatttggcacagctcgacccgagcttggatagctggcctttggataagaacggtatagaggagattatagctacaggagaattcagcaagatttcaggagctgtagacgaagacgcggaagatggtcctcaaaatttacgtggattccatacggcggaaaagatgttattcttagacggcgagcctcgtgatctggaaacaagcccgttcgcaaagaatgaattggagtatttgaagttagtgtccgaacgtatgttatctgatactcaagacttatacaatggttggttgaaaggcttaggaacttcggatgttccttcttcttatgcggaggctatgaagaaacatgacggttctgcctattccattggtaatgtgtatcaggcgattgagcttatgctgaatggaaataatggtatggccggaatctccaatgaagtaggttccgctaaaataactgacccggtgactgcatggaatggaagtaataaagacgctaccgacccgaataaccccggtgtcttggctgtagagtcttggtatagctggaattccttggacgactataagaacaatatcgtaagtatcaagaacgcttatttcggcggtcgtgatttggatgaggaatccgcttccgagagtagcttgcatgcgttgactaagatgattaatcctacgttggatagtttgatggtagttcaaattgataagacaatcgacgctatcaatgcgatcggctatcctttccgtaacaatctaggggatacggagcatatcaatacagctacagaagcttgcgctgatttaacgacaggcttgggcgttgttaagtctaagttcacgaactaatcggacaagccgatacgatgaaacgaagattacttctattattcgctttatccggtagtctgctgtgtagttgcgaatccgaggacttggaaaattggcaggttaagaaacccaatgggcaggtagcttccgagaaggaattgtccgcgggtatctcaaccattttctccaatgccccggatgcgtacgatacgcaggcaaactgggttacgggcgaattagagatgcgatttaatcgtggtgatggattgtacgacgatgctcgcggtgttgagaatgtggatggtggaggactagggccgctttatgccggatattcttgcggttcttgtcataaaagtaccgggcggacccgtccggctatagccgatggaggttccggccccggcttctcatccatgcttatttatatatcacgtaaaagtggcggctattttcaagattacggccgggtactacatgatcaagcgatatacggaacgaaaccggagggaagggttaagattactactacttcccaaaaatatacgttccccgatggggaggaatatgagttggtcacccctcattatgagataaaggaatggtatgctgatagtattccgatgtcggatttacggatttccgtacgtcaacctttacggcatgtcggaatggggcagatgatggcgctcgacttggatatgctaaagcaaatcgccgctaaaagcaattatccggaatatggtattagtggacgtataaactatgtgacggaaaagggaaagaaacagattggtatctctggtaataaggcgaatcatgccgacttaacggtggaattgggattctcttccgatctcggtgttacgaacgatcgtttcccgcatgaggtaggagaaggacagggtaatatgatgggttttgccatgaccggggcgcaggtctctacggaagatatggaagatgtggatttatacctccagaccttgggggtacccgcccgtcggaatgtggatgatcctacggttcttcaaggagagcaacttttctatcaagcgaaatgtcatttatgccatgtgacttccttgaagacacgccctcgcggatctgtccttttgaataatacggaattgcctcaattaggtaatcaggtgatccatccttattcggactttttattgcatgatatgggtgttgagctaggggatgattatcccagtggcttggccaacggtaatgaatggaggactaccccgttatggggattgggattacaagaggtcgtaaacggccatacctattatttacatgatggccgtgcccggaacctgacggaggctattatgtggcatggtggggaaggagctgcgtcgcgtaccctattctctcgcatgacaaaagacgagcgggccgctctgattaaattcctacaaagtttataaataaataacgcatagaatcgaaatgaaaaaaatatataggacgttgcttgtggtgcttctatcagcaggtgttttctccgtgaaagctcaagatacaaagaaagagatggatgataaatatgtagagaacgatgtggtttcactagcgggaaagaagggcttttctttttctaccaaggccggtgattttttgtttaagccctatgcgttggtacaggcaagcgcttgctacaaccgatatgacgaccaagggctggaaagccattatgccaagagcgtagcgaactccggtttcgcgatccctaacgctattctcggttttacgggtaaggcttttggacgggttactttcaatttatcgctgaatgccgctaagagtggaggtgccttattgcaacaggcttggttcgacgtagcgatcaaggagtcgtttcgtatccgtgtcggtaagttcaagacaccgtttatgcatggctatttaagtactttgggggagacgttgtttccggtactgccttattccgcttcccaatccgtattgcttccttacgacgtgaattatgtcataccgaatatgtccacgggattcgacttgggtgtacaggtacatggtttgatccatgataaatggaattatcaagtcggtatttttaatggtacgggtatcgacgtgaatttggcgactaagacaaactgcgatgatcataaatggttgccttcgctgttatatgcgggtcgtctggcctttatgccgaagggggagatgccaacgtctcaaggctcaccggagaatctgaacgacgataagatgtctatcgccgtatctgcctcttataatgcggaggccgagttcttgaccagtagcgacacccgtgtgggcgttgagttcgcatggatcaagaaccgctggtatgtggctgccgaaggttactatatgaatatgcattttaccaagatcatgcaaaagccggataagaatttctggggagcttacgctcaattgggctatttcatcactccgaaattgcagggtgctttgcgatatgatttctatgatcgtaacgctacggatgagggtggtttgttgaatatgcccgccgctggtttgaattattatttctttaataataatttgaagctacaggttatgtatcaatatctaggtcgtagcggtcatgctacgcagaatgaccgggatgaggacgctattggattggctcgtcactccgctacggctatgttgcagttcacgttctaatctttgggtatgaaacgatatattcaatatataatgtatgccttattcctgttattcgggctgggttgtgatgagggtaagatttatccggatgagacggttgattccgggcgaaccgctaccgtgtcactttctttcactggcctgaaagcttggccgaaggagaatatgctctcgttatgtgcttttggcgaggataagtcgaaacctttgcaaacccagcgtatcagtaagccggcggaagacggcaaaagactaaaactccgattgaataatgtcactccggatacgaggagtatagaggtcgctgtgattagtaggggattgcggttggtttactcctattatacgtctccggtggatgattcggacgaaccgcttgatttgtctgtcggcgaattggatttagcgagcttcaaacgtatacaagcgcaggtgttcgacttgaattgcttgtcttgtcatggaggaggatcgggattggccggtcagctggatcttagggacgatgtggcttataaatctttagtgaacgtaaaggcgcccctttcggaagagggtaagaactacgtgaccccgggtaatataaacaatagtttcttgctggatatattggaggataatccggtacataaggatatgttcaatagttccgggaaacaggaggtccttgctttgatccaaggttggatcttaggaggggcattggataattgataagaaagaaaatgatgaattatacgaggaggatagatacggataaagcggtagaaatgcaaatctcttcattcacgggtaaaggtggaacaacggaatatcaggtgatggtatcgatcacggacccttgtttgtctttcgtggagcaattgcaaaaccttttgcgggtttatgtgactgtcgtgaaggaagagctatcgaatgacgctaccgccgttttccgccgttattttttaagtgacgcagctaatcagacggatagcgtgatggagtgggggtgcgagagcgccttttgcccgctctctatcgttcagcagccgcctttgaatggaacaaagatcgctatgtggacctatttgcaaacggggatgtcggtacaaacgtacgattccggtttactggaagcgtcgcataacggttataggcacctctgggggggaggtgccttcaataaggcggccaattcggaataccagacccggcttttattgaatgactatgtgatgcaattgatggggcagcgttgtgcgttggcctctcattgtgtccgtacttggttctttgtgcaaaacgtagacgtgaattacgccggtgtggtgaaagcccggaaagaagtttttatcacgcagaatcttacggagaagacgcattatatcgctagtacgggtatcgagggacgtcatgccgatccctcggtgttggtacagatggacagttatgcggtggatgggttggagccgggacaggttcagttcctttacgctcccacgcacttgaatcctacttatgaatatggagtaaccttcgagcggggtacggctgttatgtatggggatcgtaaacaggtcttcatctcgggtacggcgagtatcgataactggggagagattgtctatccgggcgatatcgtaaaacaaaccgagcggatgatggaaaatatcagcgtgttgctgaaagaggcggacgctactactcgtgatattacgcaggcgatcacctatttgagagatatggctgattatgcggtggttaagaagtattttgaggcgcattacccggatttgccacatttgatagtcttggcccccgtttgccgtcccggatggttgatagagactgagtgtatagcggtcgtgccgacggagtcgtcctttaagcctttgtgaaataataataaatgtacgagatatggaagaaaaaggagtatatttggctattcaaacaccaagacaagttagaaagaagcctatgtataaaaatggaatgtaccgggaaaccgataaaatgagtgatctgatctgcgagaactatccgatggttttagtcatgagccgttttggtatagcgcttgggttcggagagaagaatatcggggaggtttgccggcagaatggggtggatgcttgtactttcctgacggtcgtgaatttcttggtcgaggaagtgaatacgcctgtcgagaatatcagcaaatgcctgtcgatcgagaacttgatccgctatttgcataatgcccatgattacttcttgaacttccgcttgccacatatccgtcgtaaattggtagacgctatatccgggtgcccggaggatgtcgcttttgtgatcacgaagtttttcgatgagtatgcggaggaggtaaataaacatatgtcttatgaggaacgtgctgttttcccttatgtccgtaatttgttggaaggaaagagagatccgaaatacaatattacgatcttccgtaagcgtcatgatcagatcgagatgaagatcacggagttgaaaaatatcctgatcaaatactatccgggagcgggtacgaatatgctgaatagtgtcttgttcgatatttttgccacggaggaagacttggcttcacatacccgtgtggaggattatttgtttgtaccggccatattggctttggaaaaacaattataagcatgaatcgatgagtacaaatctaaagattgcgatagccgaaccttctgttatcataaggagcggactggagaacctgttgaaacggttaccgggtttccgtatccagatggtggagattcattcggtggaatctcttttcgactcgcttcgtatgcacaaaccggatgtgttgatcgtgaatccggctttgcccggctatttcacgttgcaacatttgaaggaggaaagcggctgtgccgagatgaaatgtatcgctttattatattctgtctcagacagtgtgttattgcgttcttatgatgaacaaattaacatatacgatagccctgatgagatcaagcacaaattggaacggttgaacgccgaggtacttccggatgacgagccggaaggggatgacgagcaacaatcgttaagctcgagggaaaaagagatcgtagtctgcgtcgtgaagggaatgacaaaccgggagatagcggatcgtttgtttctttctacgcatacggtcatcacccaccgccgtaatatcgctcggaaacttcaaattcatagtgccagcggtcttacgatctatgcgattgtcaataagctggtcgaattaggcgacattaaacagtaatcgtatatttataagtaagttaaagggaatgtggataagcgataaaagcgccttccgcattccctttactattaatataattaaatttaatgatcatatcttattaacgcttatcgaaaactaaaacccgtttattcctgtttcttcttcaaatcattaagcttataagaaatgaagaaagcatttttacttggattagcattgttattttccttatctatgagcgcacagcatttcgcgttgaagaacaatcttctctacgacgcgactacgactccgaacttaggattcgaggtgggcttaagcaaaaaggttacattggatgtctcggcgggatataatcctttcaagttcaatgacggtaagaaactgaagcattggcttgtcatgccggaagtgcgttattggacttgcgagaaattcaacggtacgtttattggcgtgcatgcgttgggcggacagtataatatcgccgggattaaattaccctttggcatattccctaatttgaaggatcatcgttatgatggttatttgtacggtggcggacttacgttgggacatcaatggatactgaataagcgttggagtatagaagccgctatcggcgccggttatgcccgtgtacattatgataagtataattgcggggaatgtggctccaagatcgagaccaagaactcgaactattggggtgtaacgaaagcggccctttctatcatttattttatccactaaaaaacgatctagagagatatgagacatttattgagtatatgtatcgctttattgttcctcggaggtgtgagcctacaggcacagaacggtgtgcggggaactgttagtttcgagaatgtaagcgcaaggaaggacggaagccagcttatgatgaattttacgaccaatctgagtaatctgcgtttgaaatcccaagagatggtcatactgacaccggtattgcaatcggtggataaatcgcagtcttaccagtttaacccgatcgtgattaccgggcgggcacgtatgaaggcgttgaaccgtgagttgggtttcgatagttatgaatttccccaaactcctagcttgattatccgtcagacgaagaaggggccggaattgattccggtggaattgtccgtaccctatgcgggatggatgcgaaacgctaccttgatggtggatgagaataccacgggatgcgcttcttgtgaggtctcaaatgacatctatggggtgatgagccgtgtattgcctccgttagcccctcccgtttatgagcttagctatgttactcctccggtagaacctgtgaaacaacggagcgagacgcattccgcttatttaaactttgaggtaggcaagtccgtattgttacgtgatttcaaagataacgctaccgtgctgaatgaggtgaataagattgtaacggaagtccgtaacgataagaatctaagctttaccgaatttaaggttaccggatacgcttccccggaaggtggctacgattataatatgagattgtccgagagtcgtgccaaggcttttgtcgcttacatgaaagataaggagaagatggatccttccttgatgaaagtgaattggatgggtgaggattggatcggattgcgtcaagaggttacgaaatcagatttggcgaataagaaggagattctggagatcttggatattcaagatataaacaagcgcaaggctaaactacatgccttgaacggaggtcggacttataagatattattggataaatactatcctcctttaagacgtattgattataccttggcttatatcgcacgtccgttcgacgtgaacgaggccaagcaagtgatcaaaacgaaacctcaatatttaagtttgaatgagatgttcttggtagccaattcttatgataaaggtagcgatcagttcaaggaggtattcgatatcgccgttcgtctttatccgaccgacccgatcgctcaattaaatacggcggcccttgagattgagactggtgcttacgatccggccatcagtcgtttgcaaggtattaatttgccggaagcatggaataacctaggtgtcgcttatgcgatgaagaaggattatacgaccgctatgcaatatttcgatcaagctgcccaagccggcatgcaggatgccgccgcgaaccgggatgagctggccgcttggttggccgagcaataatggagatacttaccttcgaatataaaaaaagcccccgtttccggaggctttttttgtgcttataatttagctttccattcattcatcaactcggtaatggtttcccgtaccgaagtgatcttattcgctcgccaagcgttactgccggcgaaagcgtatccattctcgaaattccctttgaaggcgttgtacaaggcggtgacgatacaatacgggctgcgtgatatatcgcacgtcttgatacagttgaagggacaagctttcggttgcttgattcccgccttcactttctcaaggaaactgcaatggatggctcgtccgggcatgccgacgggacttttgatgatctctatgtccttctcctctgcctgtatataggtctgtttgaaggcttccgaggcatcgcattccgtggtggtaacgaaccgggttcctaactgaacgcctgatgctccaaggtctatcatgcgtttgatatcttcacccgtataaatgcctcctgccgcaattaccgggatctttttgtcgtatttctgctcgaaatgagagacttcctctacgacttgaggtaataattcttccaatgagaaatgctggtcttccaactggttttccttatatcccagatgtccacccgctttcgggccttctagtaccaccgcatccggaagataatcatagttattcttccatttctcgcagatgatgcgtacggcacgtgcgctggaaacgatgggaaccagcttggtgacgctatctttcttgaggaaagaaggcaagtccaaaggcagtccggcaccgctgaaaatgatgtctaccttttccgctatactggttttcaccaattcggcgaagtcggaaagagccaccattacgtttacgccgatgatacctttcgctttttcccgggccttgcggatctcttccgctaacccgagattcccagcttccgtataattgctgggtgacaatttcttatataaaagtccgagaccggctgcggagataacgccgatcccaccttcatttgcaacggccgaggctaagccggaaagagagatgcctacgcccattccaccttggatgattggaatacgagcctttaggtctccgattgttaatgtcttcattaaaaaaataaatatagtgtttcaataatcgaggcaaaggtagcacaatatcccaataaatgtgcgaaatggaccagaattatcgcgcaaatattctagtcatgtgcaatgtatggaacgaaccgattattttatgtaaattcgtccctgaataattaggcaagacgtctgtaacaggattgtaatgtatgtgaaacgggtgtgaaacaggagcgttgtaactttgcgacgcaaatatagtttttatagttaggaatgaaattaggaaaagttatagcgctcatgttagtgctgcttccattcagtatgggagcgcaggaggtggatcagtcggtggaaaaacgtatcgattccttggctacggaagtgactaccttggataaggtagtccagaagctaagcaaattcaaggtttccgcttatatccaaggacaataccaatatggacaggaggacgctaccttgaaagtgggcgataagaacgagaacttggataaagggtttaaccggatcggtatccgccgggggcgtatgaagtttgagtacaatgatgagatcggaacaggtgctgtccagatcgaggtgaatgataagggagtaagtttccgtgatctgtatatcggtatcaaggacccttggacgaagcgtagccagttgatggctggtgtgttcaaccgtcctttcggttatgaggtctgttattccacgagttctctcgaatctccggagagagcgactattatccagtatttcttcccggatgagcgtgacttgggagcgatgcttaccttacgtaccaagactaccagcccattgagtttcttgcgattggatgccggtctgtttgccggaaacagtatcaaccgggagacggatagccggaaagatttcatcgggcgtctgggtgccgagaaggcgataggcgactggggaaaatggggagccggtttctcctattaccatggttttgtctacaacccgactaccgaggcgtatgagatgcgtggcaatcatttcgttaagagggatatgggagagacgggtacttatatgaagcgccagtatttaggtttggatggacagtttagttttctttcatctttaggaaagaccactctccgtgcggaaggtttgatcggtacccaacccggtatcgccgggagcagtaaaagcccgaactacagtacccgaccggagaatttgccggaaaattctttgtttaagcgccctttccttggttacttcttttatttggtacaggatataggcgcctctcctttctccgccgtattgaaatatgacgtttacgatccgaatacgaaggtgagtggaaatgaggtcggggcggaaaatagtttcacctcaaaaaccgatttggctcaaagcacgataggtatcggcggtatctataatttcaataaacatatccgtctacaagcttactacgagtttaacttcaatgagaaaagtaaccttgtgaagggctacgagaacgaccggaaggataatgtattgacagttcgtcttcaatataagttttaattcataggattgtaatatctgtttcatcccattgaaataccgaagtatttattttgtatcgtaaataaaagataaatacaaaataatgaagaagacgattttattagctgccatggcagcgtgtttgtttgctacgaatgtgtttgcccagaagataaagggtagcgatacttgtttgcctcttacccagactgaagccgagaatttcatgaataagaacaaagccgctaagatcacggtgacgggtggtggctccggcgtgggtatctccgctttgatggaaggcactacggatatagcgatggcttcccgtaagatgaaattcgacgagcgcatgaagttgcaagaagccgggaagaaaacgaaagaggaggtgatcgcctacgacgctctggctgttgtcgtgcatccttccaacaaggtatccaatctgacccgggagcaattggaaggcatttttaccggcaagatcaagaattggaaagaagtgggtggtgcggatatgaagatcgtggcctattcccgcgagacttcttccggaacctacgagttcttcaaggagagcgtgttgaaaaataagaactatatgaacggtatcttgagcatgccggctacaggtgccattatccaaagcgtaagccagacgaaaggagccattggctatgtaggtcttgcttatttgaataaagaagtgaagccgatccatgtatcgtatgatgccggaaaatcctacgtggagccttcgttggagaacgcaaggaataagacctatccggttgtccgtccgttgttctactactatgagacgaagaatgcctcaaaggtgcgaccgttcatcgattatgtgatgtctgccgaaggacaagcgacggtgaagaaggttggttatatcccggtaaagtaagcggagaatccggacagcgttgtatgagcacatcatacaacgctgtctaaggtgcttcgacagtactgtctaaggtgttaagacaacgctgtcttatgtgttgggataagattgtccgtccgtctcttccagaaactgatccatatacagattctcgccatcccatacgatataagagaagaattgcatccaatccccggctatgagaatacgggaggtacggcttaacatcaagtccaacatgatgtggcgatggccgaaaatgaagaagtttatatcgggatgcgtctttagatattccttggcgaaaacaaccatatattctgcgtcttccccttgatactttttagcctcttgcttttccagtccgctcttccggctgttgagcgaccagcctaaagcgaacccgaacgtccagcggggatgtattcccgcatataaccattggcagaacttgttccggaaaatagccctgatcagacggaatgccttactccggaaatctacctcatcgccatgcccgaggaagaaacgtttccccaataaatcgactgtcaaggtatcccgatggatgatggcacctatctctttcggcaagtagtcgaacatccagatgtcatggttaccgataaagatatgtatttctatacctctgtccgctaactcggccaatttccccagaaaacgtacatggcctttcggcacgacgtatttgtattcgtaccaatagtcgaatagatctcccagaaaccaaatggcggaagcgtcttccttgatgctatccagccaacgtaccagtttcttctcgatggctaaagggtccttgtggaaacgggctcccagatgtgcgtctgaggcgaaatatattttcatagaaaacctaattccagtttagcctcctccgtcatcatgtccttgtcccattccggctcgaagacgaggtttacctctacattgttcaccccatcgaccgcttctaccttcatacggacatcttccaatatgaaatcggccgccggacagttcggggcggtgagggtcatatcgatgtgtacatttttttcctcatcgatatctaccttatatataagcccaagatcgtatacgtttacgggtatttccgggtcgtataccgtcttcagcatagcgacgatcgcttcttctgtttggagaaattcgttgttcatcttcttttgttttatacgcgaatatacattaatacttctatatactaaaccgggggaaaagagaatttgtttcaccggatcagccttccttcgtctgcatagctataatagccgctatcggacaggatgatatggtccagtatcctaatatccatcagcttcgccgccttttggatacgctcggtcaaggcatcgtcgtgcgtactggggcggaggctaccggatggatgattatggcataggattataccggaggccaaggcgttgatcgccgcttttaataccaaacggatatccacggaagtctggtttactccgccctgactgatttttaccttttgtatcaccttatttaagggattggttagagcgatccagagttcctcataaggtaaatcgcatagttgggtacggaataggagataggagtctttgctgcttcggatagcatcttgaggagatgcctctgaggtttcccgccgtttccctagttccatagcggcgcagatcgtgaccgccttcgcctctccgatacctttaaagccggaagttaattctttgatggaacgtttacccaatgtattcagattgttgtttacggagtgaagtatccgttgagagagttgtacggccgtctcctcattgttgccggatccgatcagtatggcgatcaattcggcatcgcttaatacggaagcgcctttttgaagcattttctcacggggcctgtcttcttcggcccattccttgatggaaagttttcctgtcttttctttcatagtcgggaaaggtttatgatttggttaaaaaaatagttcccgcctgcttatcaagcgggaaccgtatattttgacaagacccggattactcgcggatacggcctacgtaagaaccatcagtcgtattgatctcgataacctcgccctcgttgatgaacaacggaacgcgaacttccgcaccagtctctacggttgccggtttcaaggtgttagtagcagtgtcacctttaatacccggttctgtataagtaacttttaattgaacttttgtaggcatgtcggcgaaaagaaccgtatcggtagatgcatcagaaacaacgtctacaatttctccctctttcatgaaatcaacgccgttgatcaagtttttgtcgatgatcacgtcatcgaatgtctcttggttcatgaaatgataatgctcgccttccgtataagtgaactgatacgggcgacgttctacgcgtacatcttccaacttctcaccgatattgaaacgacgctcgatctgaccgccttttacaacatctttcaatgtggtacgcatgatggtattacctttacccggttttacgtgaaggaaatcgacgcagaaatagagttttccgtccaaacggatacaagttcctttcttaatgtcttgtgaattgatcatatttattttctttatttatatatgttatagagtaatccgtaacgatttttgggtacaaaagtagtacattcctgctaaagtagcaaaaagttttgcgtatttatatggaaaaatagttgcaaatcaaccgaataaccggaaccaagaccgctgtcatgatacccatcaagccaatcgccagtccgcttaatgctccttcgatggccccgatttgaatggccgctgctgttcctactccatgggaggaagcccctaacgccagtcctttagcgatatggctatctattcccagtaccctcatcacgatagggcccactatactgccaaagattcctaccgctacgacgatgacggcggtaagtgaaggtatgccgcccgctttctccgctatccccatagcgatcggggtggtgacggatttcggttggagcgtggcgatcaacgcttggtcggctcccatcaatttaccgatgatgattacgcttacgattccgacaatggccccgacaaatacggaagtcaagatcgaaacgacatttccctttagatattggatttgctcatataacacatagccaagggccactacggaaggccccaacataaaatggatcaaatgactgctttgctggaacgactcatattgaatgcctaggacttccagtaccacgataatcacgaagatggtcgtaagcaaaggatgcaaaagactgatatggactttcttgtaaagagccaaggaagtcaggtaggtaccaattaccaaggtaagagcgaaaatctcggaatgcgccagattatccatggtctattttcccttttccagtttttgttgcaccaacgctacgctggcgatgactaaaattgtacttactacggaagcgatcagcaggactgcccaatactcggagatgatcccgaaggaattcataagccctacaccggcaggaacgaagaataatcccatgttttgggtaagaactgtggaaagacgtttcaccttttcaggttttactttcttgaacgcgagggctaagaacaatagcaccatcccaattacgctacccggtatgaaaccgtcgataaagtagctgataaactctcccgtgaaatagaagaagagaatgtaaaatgcttctgttagcatagtttttctaccttttttgataaccgctacaaagataacagctatttcgtagatatgttctataacatattattttaacattgtagggacggcgtccgtccctccgtggcatcaagctaacgcggaagtaatgaacatataaatcatcataccgataatatcgttggtaatggtgataaacggtccggtcgccaaggccggatctatcttcatcttatctaaggtcatgggaactaacgtgccgaatatactggcgaacattacgacggcgaataggcttaaagatacggaggccgtaatcccccggtctcccagcatgaagaagttgtaaatgaacacgaccagactgataatgctggcattgattaacgagactacggactcttttaggatttgcggtacgatattcccttccttcaaggtattgtttgccaagccctgtaccacgatagcggaagattgtatgcctacgtttccaccggtaccaccgatcagcgggataaatagcgccatcttcgggttagtggcgaaactgctctcgaaaccaccgaggataacggagtttcccaatcctccgatcatgccgatcagcagccaaggtaggcgggcggcggtttgggtgaatacattatccgaggtttccacgtcttgcgagataccggatgccaactggtaatcacgctcgtgttgctcgcgtacctcatccataacgtcatcgatcgtgatacgtcctaccagacgtccgatactatcgactacgggcaaggctaccaagtcgtatttctcgatcgtctccgtaacctcctcgatactgtcgctgtcgcgaacggagatcgggtcttttttcatgacatgcttgatcttggagacggatgggtgggtaatcagtttctgcaaggggagcacgcctttcaagcgctcgtcgtcgtccactacatatacataatagatctcgctcatctcctccgcttgcttgcgcatctcgtcgatacatttgggcatactccaattctcgttcaccacgatcatctcggtacccatcaaaccgccggcggtgtcctcgtcgtatttcaacaagtccacgatatcaccagcctgctctacgtcctcgatatgcgaaaggatctcctcttgggtatcctcgtccaactcacgcatcaagtcaacggcatcatccgtttccatgttatcgacgaaacgcttggcgataagctcattgggaagttccttcaataacttatgacggtcttcctcatccaactccatcaatacatccgccgctttgtcgccatccatcaatagatagagataaatggcctcttgcaagttcagttcttgataaagctcggctatatcggcaggatacagttcatgaagtacctcctgtgccttcgcgtcatctttggcctcgatgatgcttttcaggttctcgatgtaatctttcgtcagttcgatcattggactcttatattattataggacatcaccagcctgcttctccagatgcttttggctgatcaaggtcagttccacgaattgctccacggataactgttccgggcgcttgtcgaatatcggcaaggcgtaatccgggcaatctttacccaataggggtttcatggaattacgaagcgtttttcttcgttggttgaatgaggtctttactacggtcttgaataacttctcgtcgcatcccagctccttgcggtcgttacgagtcattttcaatacggcgcttttcacctttggaggcggatcgaatactttctcactgacagtaaagaggtattccacgtcgtaccaagcttgaagcaatacgctcaagattccgtacgtcttgctaccgggacctgccgctaggcgttccgctacctctttttgtaacatccccgagcagcagggaatctggtccttataatcgaggactttgaagaatatctggctggagatattatagggataattaccgatcacacaaaactgccccggaaatagcttcgagagatccaatttcaggaaatcctcggcgatgatacgtcctttcagatcggggaaattctggttcaggtaatctacggattccatgtccaactcgacaacggtcaaatcatgtcccgcctccagcaagaactgggtaaggactcccattcccggtccgatttccaagaccggcaaggatttgaaagtatcgagtgtgtccgcaatgcgctgtgctatttgcagatcctttaggaaatgttgccctaatgctttttttggcttaactaatctcatccacttttcggtgtaatgtgtttgtttttaaatattatgcttatctttgcggatgcacaaaagtacaataaataatttaaagttccctatacctaatggattttaagagcattctacgtacgtttctgaagataattctacctttagccttcggctgtttactcctttggtttttgtatcggaaaatggatatcactgagatttggcgagtagtcaaggagggggttcgttatgatattattctggtttctttactgttcggcttgttcgccaatatcgtccgtggtttacggtggggattgctgatcagttccttgggcgagcgtttcaagatgagtaacgtgatttacgccgtgttgggtaattacgcggtgaatctggtattgccccgtgtcggcgaggtatggcgttgcggcatgatcacgaaatacgataagatctcgtttaccaagcttttaggtaccttgttgatcgaccgtgtgagcgatacgatcatggtcggtttgataaccttgatgatattcatatttaatataagcttctttacgagtttcttcgccaagaacccggctttgctcgaagggttccaatccatgtttaattcgatatggatttacgtggcggtgataatttttgtcgctgtaatttggtttgtattcacttatatgagtaactttacgctggtacagaaagccaaaggcatgttgaagaatatatggaccggtatgaagagtatctggtacatggagcataagatgcgtttcgtgatagagacgttattgatttggggaggttatttctgttacttttatataacgttctatgctttcgactttaccaaggacttgggtatcgtggtcgggctgatcacgtttacgatgagtagtatcggcgtggcggtgcctgttcaaggcggtatcggaccgtggcatttcatggtgatcgctaccttggtttgttttggcgtgaacgagaatgatgcggcggcgttcgccttggtcgttcatacggtacagacggtatggactggattgtgcggattattcggcgtggtggctttgccgctcaccaaccgggagaacaaagaggctccggtcgctgtttcgtgatgaatacaagatatgtattaaatatgaactgaactaaattattaacatctatgtcagcagaaatcaaagatctatctccgaagcatgtatggggttatttttatgaccttacgcaaatcccccgtccgaccggacatatggaggcagtaacccgttttatgatatcctttggtaaaggattgggactggaaaccctgcaagatgaggtgggtaacgtattgatccgtaagccggccacgcccggaatggaaggtcgtaagaccgtgacattgcagtctcatctggatatggttccccaaaaaaactcttccgtaaagcatgatttcgagaaagatccgatcgacgcttacatagacggtgattgggtgacggcccgtgagacgactttgggggcggacaatggcatgggcgccgctctggcgatggccgtgttggcggacaatagcttgcgtcacggaccgatcgaggccctgtttacgattgatgaggaacagggaatggacggcgctttcggcttgaagccgcatttcttacagggtgatattttattgaattgtgattccgagaaggaaggggagttgttcgtaggttgcgcgggtggcgctaacgtgaatgtctctttccaatttaaggaggatacttatattccggaaggtgacgtggctgtcaaggttagcttgtctggcttgaaaggtggccattccggtgtggatattcatttagggcgtgcgaatgcgaataagttgatcttccgtttcttgaaagaggcggtttgtgattatggcgctcgcttgtcctctgtggcgggtggttccttgcctaacgctatccctcgtgaggcttttgccgtgataacgattccgggtgataacgtggagtctctttgggagctagtggctgattaccaagatatgttccgtacggagtatatgggtgtggaggatcagatcgatttcgtcgcggagatggttgaattgccgtctacgttgattccggaggagatacaggatgatttgatcaatgcgatcgagggttgccagaatggtgtgattagcatgttgcatgatttcccgggtacggttgagtcttcctctaacttggcgatcgtgaagacatctgatgagttgatcgaggtgaagatcttggtgcgtagctcatccgagtctcgcagggattctgtttgctcaagtctggaaagtgtattcgctttggcaggggctaaggtggaggagtccggtcattataatggctggcagcctaatatcaattccccgatcttgaacttgatgaaatctacctatctggatttatttggtaaggaacctgaggtgaaggtgatgcatgccggattggaatgcggtatcatccaaggtgcttatccggatatggatatggtttctatcggaccggatttggaatatccgcactcaccggacgagcgagtgaatattcattccgtacagaatatctgggagtttattacagctacattggagagaatctaaggatctcctttctatatacataaagagcccttcagcctgtggccgttagtaacggattaggctgaagagtttttatcattttgacatttcgcaaacagaagtccgtgagaatcgattatttcgagccaatgtacgtctcgttcccaaaaacgaaagaaaaaatcagcaattgtctatccattagcgacttgtcgaaaaacacccttttattctagcgaaattaattcatcttagctcatatttcatgccttatgatccagtcgttagggggtaagaatgcccattataaggtagtcatattgcctattatgactatatgtgtagcctatcgtgaccatatgtgtgggttaatgcgactatatgtgtgagttaatgggactatatgtgtagcttgacgagggtaatcttatcaaaaaacagggcttttcgcgtcaaaaaggtgtataaatgcctatttcttctctatagttccctctagtttgtcattcttatttagaggctgtgccacgaaaaagggtataatccaatcaaaaggatacgctttttgatctttcaatgacatgttcgtgtttgtctgttgtatgaggaataaaaaggggaaacttaaaagtatagaatatacttatatataatgtacgtccgtacatttatatatgagtagatatgtatgaatttaatttagctgaaaacgactagtataaacgatcgattcttttagtcatttgcaaaggtacgcgtttcttcgatacttgcaacccttccagacgatttttttatcgcttattctctttcttatcaataggataggttatccttcacgaaacaagcgattccttcaacgaacctcccgtttcgacgctcaaaaaacgcaagatttagacgatcgtttagactagtcgtttttatcgacaaacggcgattctcaattagtctaacaggttgattatcttaataaacactagtattaatattaatttatttattatgaacaaaaagttttctacttttttggcgggtgtcgctctgttgagtgcgatgtctgctaatgcgcagaatcttgcaagtgctccggttggtgctgatgccgccaaggttgtgaagttggatgaggctgcaagaaaaggtgtgtaccaaatcagagacgataagggacaggctcttgttattgagaatggcaaatatgcgtttaagactgtaagctcattgacagatctaaaggcttccttgtggtgtgtaaaggtaacagaggaaggttctggtaaagaacctatttatgacttctttaacaaggcgactggcgagactttagctgtttctgatttagatgcttcggctattaaggctggaacatttgcgacaacagactctttgactgttggcgagagctttggtggttgggctttctctagtacttatgagactacgctgctagataaccagcctatgtatacgtattatgaaccagactatgtgcttcttttaacaaaaggcactaataatggacttcaagcaaaaagagtattggctaaagatattagacaggatgcaaaatctaagggtgcggtagaacttactctgtttaatgccggtacgtatgtattgagcgctagcgagatcaatgagtatgtgaaagacaataagttcgttcttacttttgagaaggatgcgaacgcagacgttaatccgttctctacaactcagttcgtagcgaaaggtgttgctgataagaaagatagcaatacggcacgtaatttcgtattcgttacttccaaggaagacgcgaaccaatatttgaaagtcgatactgccgctaacggtgttggtatccagttcttgaagtttggttggacagatgagtctaaggaacctagcaaggatgtagagaactcaagtcttgcggatcagcataagttcttatttacctatcgtccttctacggatagcttgtatatccaagtgatgcaggctcgctataagaacgagaagactccggagaaatattggaatcaagtaacaaatatcatcgactatggaactacataccacgatatcttctgtgcgggagatgaggtaggcggacctgcaggcgctgatagcttgttcgttaagttgcagaactttactgtggctgatagaatcgctactatcggtttgaaaccaattaatacgcatattaaatacaatgctacaaactgtttcgttcaaagcgataagacttcaaaagacaatggtttgtatatcattaagaatgccaagggagaagtgttggccgctcctatccatgaaaatgataatgccggtaacaataagatcgaatgggtgaaattggatgagcaacagccattgcacatgcctgcttatcagtgggttgttacgaagactttgagcactgcgacttctttggctacttctccgattactatcaccaaccgtgagttcccgaataagaaatggaacaatgttcaattgagattgaatgataaaggtgagatcattgcgtcttcttcagaatttaacaatgttacattcgatcagattaaagattctactatcatcaaggataagaagttaggttataaatacctttcaaataatgagttgatagtaaataaatacaaattcaactatttgaatccgtttactcaggactattggatcgctaatggtgcggataaggactctttgatctacgtaaaacaagatgcgaatgagtatattttgactgaaggatctaccgctgagtatggtattgatgttgacgctacattattaaagaagatcccgggacttgctcaattggaaagaacaaactacgtgatcgctaagaacaagacggctaaattagttaaggcttatggtagcaagtattctatgggtgctgctaattatggtactgtagcagaagtggatacattcttcttcaaagagaacaaccactatgatggcaagcattactatgcgatcttggagacagcttatgataacacgaagcatgcggcatatatcgctgatctgaataaagagacttctaaagttggtatcgctgatgacggtatgaccgcaggtttgaaggttcagttattgaatgagtctagaacctccgcatttactgtagagcctagcgatgctccgttgtatcgtcgtttcaacaaggcaatcttgggtgaagatgagaaagatggtcctgatagcttattgttcgtagagaaatatcgtaaagaatacttgatggatgaaggtaacagtagtttcactgacgagttcgttgattatctaggtatctggagcaaggaaaaagctgaaaacaagttggctatgcgcattgataccgcatggttgaaccgtggtgctggcaatgttaagcctcaatatttgatctccgtagcccgtgacgatcaaggcgctatcgaaacgattccttgtgatgaggcagatgacaaacacttctatattgatgataagggtgttgcccataagactgataagtggcattgtcaacatgctaaacaaggtagaactggtttcgcttatggcaaatatttggtaagcttcgccgactctgcaagaatgaaagatagcaatactaaaccttggatggatatcactaacggttatactcgcgtaggtttcgttaaggcagttcatgcaggtgatagcttgttcatcttggttaacgagttcaagaatatgaaaccggcagacttggatacggctgatatcgtaaaggcatacaccgccgctaaaatcaacggtaaatatatcgttaacttacaaggtgaccaacacaagaacgtaacgtggtcattccgttatgtagatcctgacaaggcagccaatgtaacagaggaagatccgaacgttaacgcattcatgttcgagtctaatgtttatacggatgaaaaattagatactcctgattatgatgctgttgcgggtgctcaaaagaatattcctttaagcaatgttcatggattgggtaatgctatcgctccgaactatgcggcatggttgaagatgcagaatggttgtctggtattgacacgctacgattcagacttcaattcttctaagacaggtggtgatgcggctttggtattcaatgtggctcaaaagactgacgcggacgatatggttacctctatcgatggcgctaacgtagaaggcgtatcagtggtagctactaacggtgctgtgactgttcaaggtgccgctggtaagccagtagtaatcaccaatatcttaggtaaggtagtcgctgagacagttctttcttctgataacgctacaatcgccgtacctgctggtatcgtagctgtggctgttgatggtgaggaagctgttaaggtagttgttaaataattaaacgactaatagataggtcaagagatgggggattccccatctcttcctttaagaagatatttataattctgaaattcccgtgcggagatagactcttcaagtacactgcgatggtagaacatgcggggatattaatactaaagtaaaaaattaaagctctccgtcagtatttccgtgaggcaagaaagcggaaaaagaataagccccggtcggtttcttgatcggggctttttgcctattctttgtcgtttttatctttaagtctcaatccggttctagcgttgaggggagagattaccgagtggcctaaatcgctttcaagttgtttgcgggcggcctctgctgcttttcctccttgtttggcgataacttcgtgttcttcgagatgttgcggattcttttctttggacaattcagtggtagctgcttcggcaagcatattaagagcaagctccgtattggtcatattgtctcgcaggctctcttttttcagtcctttgaattgtttatattctttggcagttttaccagcccacgtttgatagatgatatctgtaagggtagcgaagtgaataccctcttgtagtccgtgccgtttccattcgtcggttaggtccttgcgtatctcgatacttttaaggcgttgattaatccaagttatccgagtaccctaaagctttatattccctcatggctcgatctatcgttaactcggggtcttgcatttcatccaatcgctcttttgccacttgggccatccatagcttgaaaggttctgctttaggggatgggatggattggataagccggaacagctgttctgtcgtagctacgtcggttttgtagtatttcccatcggtagaaggtaatttcagttggttacaatttgtaaccaactcatttccctcttttcttagcctatgtttcagcaccttccagtaattgctaggattaggactatctgttaggatagcgacaacgtctactacagagaaaaaccattcctctgtttcatcgtcccagactgtacgtacttttttctcttcgaaaatcttgatagcttctttctttgtcataattgaagtttttgtgtgaacactttagttaaaagtggatgatacctaaatctgtgctatggttttggatatctcgaaacttttgcgtaaaaatacaaaagattcgaatgcctcccaggtttatacgggaaaaaggatcgtagagacagtttttattaccgacaacgctaggatcgtcatacttgccggtatcgaagccgtgattgttgaatgtgagaccactgttaaggtggtagttaaatacagtttctcgatcggggcttttttggtgaatctttttaattttgtacttttgtaggcttgcacgaatgttatacatgaataggagaattagacaatggccagcgatgatataaaacaggcatggaaagtgccggaacctacgttaaggaggttgccgtggtatcttgcgttcgtaaagttgatgaaagggaaaggggaagcgtttatctcatctacccagatcgctaaggagataaatgtagatcctagtcaggtcgctaaagatctctcttttgtgaatatctccgggaagacgagagtgggatacgatattaacgcgttggttgacgtactggaggatttcctcggttttacatcccagcataaggcatttctgtttggggtagggagtctgggcgcttctttgttgcatgacaccggactgagccaatatggtttggagatcgtggcgggctttgatgtccgtgaggatttggacgggagcatgatcaatggcattcccgtttttcatatggatgattttcctgccaagcagaaagaatatggcgcgacgatcggggtgatcaccgtgccggtggagaaagcgcaggaggtgacagaccggattatcgagggaggaatcaaggctctttggaattttaccccgttccgtatacgggtgccggaacatatcgtagtccagaacacttctatgtatgcgcatttagctgttatgtttaatcgattgaactcaatgaatcactaaaatatgaagattatcgccgttggaatgaactatgccgctcacaataaagagctgcatcattcgttagaattatcagagcctactatttttatgaagtcggactcctctttgttgaaagatgggaaaccgttttttattccggatttttcatcggaagttcattatgagacggagatcgtggtacggatagaccgtttggggaaaaatatagccgagcgtttcgctcatcgttattataatgaggttacggtcggtattgatttcacggcacgggatttgcagaataaattgcgtgcgcaagggctaccgtgggaaattagtaaggcgtttgataattcggctgtgatcgggacctttattccgctggagcaagcgggggatgtaaaccggcttccattccatctggatatcaatggctcgaaggtacaggaaggcaatacctcgaatatgctgttttcggtagataagattattgcgtatgtaagtcgcttctttacgctgaaaataggcgatttgatttataccggaacacctgctggcgtaggtcccgtgaagatcgacgatcatctggagggatatcttggcgagcggaagcttctggatttttatgtgagatgagaagattaatatatatattcattataggtttattactttgctcatatacatgggcggatggtagccgttatgcttctaactccctgttatcggaagggaaatgggtgaagatccgggtggataagaccggaatctacaaattatcctatgcggatttgaagaatatgggtttctcggacccatcgaaagtctctgtccatggctatggaggatggcccttggatgaggatttcagtaaagaatatatcgatgatgtcccttctactccggtttggcgtgggagtgattacctgttattctacgggaaagggtcggttaaatgggaatatgactcgtcgagccagacattcgtgcatacgaataatccttattcattgtatggctattattttgtgaccgatgccacacccacgaatgatatgacttccgtggctcaagcgagtggtgcttccactcggattacgacttatgatgattatctattgcatgagcaagagttagtctccgtaaaccaatccggccgggagttttttggagaggactttagtggggcacgccctcgtacaatttctaccttttcttctatccccgggattacggatgcggacggtaaggtgaccatgcgttttatctcaagaattaactctggctccggtacggcttctttaagtatcaatgactccgaattgttggatataaccataccttctatccaaacagtaagctcgaatgtcagatcgtatacaaaggcgattcccgggacaaccaccgcgttatggaagggatcaaaaagtgagaaaaataacgtagtggtttcctatagttcaagtggacatacgaatgtacgtttggactatatccgtatgcaatttgtccgtacgttgcgcccttatggggcttgtacttttttcagaagcttgacttctgtaggaaatgcgtctcgctttgttattagcgaggcgaattcgaataccttggtgtttgatgtgaccgatgcgttaaatgtgaagagagtggaagccgatctgaatggttctgaactttcatttacaataccagcgggtagattgagggagtttgtgttggttcaaaccaatcaaacatttccttctccggaagtcgtgggagaagtcgcttcctcgaatctgcatggtttggaacagagggatatgattattatatcggccccgtctttggttcagcaggcggagcgtttggcggttgcgcaccgtgagaaagatggcttgactgttgaagtcgtaactccagaggcgatttataatgagttctctagtggaactccagatgcgacggcatatcgtcgtttgatgaagatgttttacgatcgtagttcttctttaggtaatcctccaaaatatttattgcttttcggagacgggatctatgataatcgggggataagcggtgaggtgcaaggtgtttcatggagtaatatgctcttgactttccagtctcaagagtcattgaatgtctactcttatgcgacagatgattattttgcgtttttagaggataattccggcagtaattttagccgagataagatgtgtctgggtgtcgggcgctttccaatccgtacagtaacggaggcgactcagatggtggataagacgatttcttatatggagaataaggattcgggtagttggaagaataacgtgacattcgtggcggatgatggaaataatgaggatagtttcacaacgaatcatatgaagcaggcagatcagcttgctgaggccattgaagagatgcaacccggttttctagttaataaagtgtatttcgatgcttataagcgtagcagcctcgggacttatccggatgtgcataatgagattgagaaactattaaaaagtggtcagttgttgattaattatacggggcatggcagtacgacccattgggcggacgaaagcgtatggacacaaaccgatatcaataattccagctataagcatctgccggtgtgggtgacggctacctgcgattttacccgttttgacgatgtgaaaacttctgcgggtgaatctgttttcttgaatcctaccagtgggggtatcgctttgtttacgacgacccgtgtcgtgttctccggtaataatgcgaacttaaataaggcgctcatcgataacctgttccaagaagacgcgaatagccgttatacacttggagaggcgatgatgtatacgaaacgtcaactcaatgactcaaataaattgaactttatcttaatcggagacccggcgttaaagtttgcgtatccagagtataaggctcgggtgacggctgtgaatggagaagctgtttctgatgagccttttgagtttaaggcgttatcccggattacggtagagggtgaaatcttgaatccgtcaggttcttttgccgcggatttcacgggcgtattaagctcgaccatatttgatagccaaagttccattacgactttagggaatagctctgagaaattcacttatctcgattatccgaatacgatttatataggtagagactcggttcgaaatggaaagttcagctttacttttatggtcccgaaggatatctcttattccaataagaaaggtaaattaaacctatatgcgtcttccgagacaaaagaggcgcagggttcttttttcgattttatcgtgggggggacttcggatacggcggagactgatacgatcggtcccgagatccggcagatctatttgaatgattccagttttgtttcgggcgataaggtaaacacgactccttattttgtagcgaagctgtgggataagagcggcgtgaatataaccggcagtagcgtagggcatgatatgatgttgacgattgatagtatgccctctatgagctataacttaaatagttattatgcgttgctaccagatagtgagaacgaaggacttgtccagttctccatccctgagctggagccgggaatgcatacggctgagtttaaggtgtgggatatcttaaataactccacaacctatacctttacttttgaggtggcggaagggttgaaacctaatctgatcgagatgtatgccaccccgaatccggcacgggatcaggtggaattctttctgcatcacaatcgtccggagtcgaacttaaaggtgacggttatggtttatgatatgaccggtaagttcctatggagtacagagaagagcggttcctccgagttgtttaaggcttatatcgtaacttggaacctgacggataacggtggcaggcggttgcgcccgggagtttatctgtatcgggcggcgattagcacgaataactcgaaagaggcgacgaaagcgaataaattaatcattctcgcacaataaagtatcgggtaattagtttataataagcatgggggtatgtttattaccctctaggaatgataaatgtaaatgtatttttagaatagaatatatggtaagagtttcaagattcagtctgttactagcggttttcagctttttgacggcatttacggctttatatgcccaaggaggcgcagacgatgttaaacataaattcgccccgattaatacggcgataccgtctttgtctattgcgcccgatgctcgcggaggtgctatgggtgataacggtgtggctactacgccggatgtgaattcccaatactggaacccggctaagtatgcttttagctatagtaaggccggagtcgctttatcctatacgccttggttacgtaaattggtgaatgatgtggctttagcatatctggccggttattataaattaggcgatagcgatatgcaggcgatcggagcttccttgcgttatttctctttaggagaagtacaggaaagccgggatggaggaatgggtaatcagctcatattgaatccttatgagatggcttttgatgtaagttatagccgtaaattatcggatgtgttctctatggcggtcgccttgcgctatattcgttcggacatgggtgcctcgtcggatgcggatatggttccggataacgcttttgccgctgatatcgccggttatctggagaaatacgtgatcttagggaatagcgagtgcctgtggagctttggttttaatgtctccaatatcggtacgaaggtctcttacgacggtggaaataccaaccaattcttgcctacgatgttaaaggttggaactggtttactgtatccgatcgatgattataaccaaatcggtatctatgtggatttgagtaaatatttagttcctaccgaacctattcaagaaggtacgactcccgaggatgaggctgcttataaggaaaaacatgatgaatataacaatatgtccccgatcacgggtatcttcaaatcattcggtgactcgccgaatggcttcaagggcgagctagaggagattatggcctctatcggtctggagtataattacaatcagcagttctttgttcgtggcggttattactatgagaataaatatcagggaaaccgtcagtacttctcagtcggtgctggtttccgcatgagtgttttccagttggatgccgcttatctgatcagtacggtacagagtaacccgttggaccagacattgcgcttctccttgtcgttcgatatggatggaatcaagaaccttttcagataaatggatatgaagatacgtgtaggttttggctatgacgtccacgccttggtgccggaccgggaattatggctaggcgggattaagatcgagcatacgttgggcctattgggacatagcgatgcggacgtgttgatccatgcgatctgcgacgctttactgggagcggccaatatgcgggatatcggttatcatttcccggatacggctggtgaatataagaatatcgatagtaagatcttgctccgggataccatgaggcttttaagagaggcgggctatgagttgggtaatatcgatgccaccgtagccgccgagcgccctaaattgaatccccatatccctctgatgaagaaaacgctggccgaggtcatgaacgtggacgaggaggatatctctatcaaggctacgaccacggagaagctgggcttcaccggacggcaggaagggatctcggcttacgctacggtcttgatacagcgcatgggatcgtaaaccagaaagtactcccttttccttcttccgactctacgccgatcttcccgtgaagattctctaggatcgtttggcaaatggatagtccgagtccggttccttggataaaggaatcgaatttggcgaaacgctcgaatacgtgcgggaggttcttccgctcaataccttttccggtatcttttacgtaaaagtataatccatcttccctctccttgtatcccatgcggatagccccttggaacgtgaacttacaggcgttcgtgaggaagttggtgatcacttgggtcaagcgattcttctcggaatagataacgcaatcctgttcaggtatctcgcaatagagagtgacaccgtctttcacccggctttggaaggtctggtataagctccggaatagcgtggatacgttgaactcggaatagatgaaatccatttgcccggcctcgatcttcgataggtccaggatatcgttcacgagttgaaggagaagctcgttgttcgtctcgatgatctcgcagaactctctcgtctcctcggagtggcaagtttccgctagcaggttggaaaagcctacgatagcgttcagcggggtacgtatctcgtggctcatgttcgctaggaaggcggatttcaaccggttggattcctctatcttctccttgtccctcagttcttgttccatttttttccgttggttgatgagggtagtacctccggttaagtaggcgggttttccttccggatcggttttccctacgatcgcaaagatctctatccatgtatattcaagccctgtatcgtctaaataacggatctcctcgtcgatcgatatgctctcgccggcgattagtttattgatcgcgtcttgcatctgttccaagtcctcggggtgaatgccgctataaaactcgtccgccgacatgcagaattggccgtcgattcccttgtcgcgaatggatctttgggtcaggtaaatattgttacattcgagccgtgcttcttttacgtcccatatccatgtcatcatgttgctggctttcaagacgagctggtatttctggttcaggtcttgcgcttggcgtgcgatttgcagctccttgtctttggccttttgcttttggatgaagaggcggacccgtaagatcccgatcgttatcaataacgccagaatgacgagtaggcttatgatatggatcttgtatttctgtaagaaaccgggaggctcttggaaatacgtggcgttcgggggatataggccgggatcgatctggtgaagcaatagatgctggtaatttaggtaggccctcggggtttccgcggtctggatcgggatttccttactatctttccccgagaggatcatttcgatcgtgttgaccgtcacctgcgcataatcctccggagaaacataatatcccccggcgaaattcccgttttctgtttgtacgtcttgcaaggtaaagattggggggacggagaaactattggtcattttctggacgttatcgactaggtaacgattctcgttatccttccgggtcctgtaccatgagtaataaaggactccggtcttattgtcgaaagaggccagtctgtccaataagttctcggtggaaatggaggtggtagacagtggctcgaattggatgcccggaaaatctttccgtagcacggcctctacatccgctttcgtttgctggcttatataacggcggtcaaaaataaaggccagtttggttaattccggttgtagctttttgattagctcgatcgtttgcttgatatagactgggtattttataaaagtggcgttatagccttttactacgtccgtgatgggaaccagcgtatcgagcacgtttttatctaggtctatcaggtactcttctttcgggtacatataatctctggcgtagcagatgatagagggaatatctttccattccttgtcaaacaacgggcgggcgacaagccaagagggatctcctatgcatacgactaaggtgggtggcacgggaactctctctaggatcattgttctcttctcttgaaacccttccatagtgcggataccggggatctgtaagggaatcgcctttacggtaaacccttcctccccgaattttctttctatatcaagataggtctgttttgtccagctttcctcgaagttgatggagtgcagtacgacgatcgacggtttctcgccggagcctcgcgcgctcatgttcaagtggaccgttagtataataaaaataaaaagaatgatatttctcatggccgttaattctaagcgatatatgtagcaaacgtgattctggtagcaaatgtagtgattccgctttattaagcaagaggtttgcctgaaaataaaggttttatatgtagtaaaatggtaatagttccatcttgataggatagccttttcgcccttgtttgcctattcggagattaatacgtagctttgagccaataaagtggtatttttatgaagaataatgattggaaagatcgattaggcgtgatgtactccacgaatcccgattttcaatataatacgggagatacggaagaggaagatacgttgccgaaggagaaacaagctttgcgcatatccttggataagcggaaccggggagggaagatggttaccttgatcaccgggttccggggcacttccgaggatctgaccgccttggggaaactcttgaaagtgaaatgcggcgtaggcggttccgctaaggacggggagataatcatccaaggtgacctgcgtgccaaggtgttggatatcctccggaaagagggctattcgaaaagccgtacgatctaatccccgatcgctatgctaacaatttatagggcttccgccggggcgggcaagacgcataagctgacaggggagtacctgatgttgctcttctcccagccgggcgcttatcgccggatcttggccgtgacgtttacgaataaggcgacggatgagatgaaaacccgtatcgttcaagaactttatcacctcgcttccggccgtgcgtccgattatatccagctactctcttccgcctattccttgacggagcggcaggtgagggagcaggcccggaagattctggtcgctatcctgcacgattactccgcttttaatatcagtacgatcgaccgctttttccagcaaacgatgcgtgcctttacccgcgagatcggtttgcaaggcggttatggcatcgagatggaccaagaactggtcttgaccgaggcgatcgataacctgctggccgatctggagaagccggagagcaaggatttgctaggttggctgctgcgtttcgccgaggacaagatcgaggatggaggcggctggagtttgcggcaagacatcatgtcgctcagccgggaggtctttaaggagagttataaggcatttagcgaggaagtaggtaaggatatcgcggataagcaggcgctcgatgcctataagaatgagctatacgccatcatccgctccgtagaggcggaggcgagacgtttaggagaggagggagtggcgttgctgaaacagtttgcgttacaaccctcggattttaaggggggaagccgttccccgtttttctatttcgagaagctggcgagaggtgagatgaaagagccgactgccacattccaaactttgccggataatccggatgcctatacgaccaagactactccaccgggtctccggcagatcatcgggtgtgtatatgaggaagggttgaatacctgcgtaaagaatatcgtatccctgttcgccaacctgacggcctataacacggcccgggagatcgtgcgttattattatacgttagggatcttaaccgatatctcccggcaaatcgcctcttaccgggaagaaaagaatgtgatgctgatcgccgatacgaccgagttgctgaataaggtcatcagtggcagcgacgccccctttatctacgagaagacgggtacgcacgtagatcattatatgatcgatgagttccaagataccagcggcatgcagtggaataatttccggcccttggtggaggagagtctggcgaatggtagggcgaacttgatcgttggcgatgtgaagcaaagtatttatcgtttccgtaactcggattggaagctattggacgagcaagtccgcagggatttcgaggaggaacaggtccgtgaggaaaccctgatggataattggcgaagctgccgccatatcgtggagtttaataacgcgttcttcaccgccgctccggcgatcctgcaggatctatataatgaggcgttgaaaaactcctcattaagcgaggaagaacgcacggcctttttcacgaagatcatgaccgcttatgataagagttcccagcgtgtccctccccctttccagaagaaggacggacatgtacggatcgatttcttgtccggcgatgaggagaagaagtgggagcaagaggcgatggagcgattgccggctaccttggagcgcttgcaggataacggttatgcgctaaaagacatcgccatactcgtgcgtaccaatcaagaaggcgctttagtggctgatacgttgctagcctataaggaagagcatccgtccgaccggtacaattacgatatcatctccgatgatgccctgttcgtgggtagttctccggcggtccgtttcctgatcgccgtattgcgctatttgcgaaatccggaggaccggatgaacaagaaattggcgatgtatgcctatcaagtattaaccggaaaattcggggagagcgaggcggatgagtctgttttccaaaaccttcagtctatttcccggcaatccttgtacgaggtaaccgaagggctcttccgtaacttctccgcttacttcccggaaacggaacaggtattcgtgcaagcctttctggatatggtttccgagtacgcccaaaaagaaagcgcggatttgaaccgtttcttgagatggtgggacgagaccggttatcgaaagacgatcgctaccccggatgggcaaaacgctatccgcatcttgaccgtacataaatccaagggcttaggttttaaggtcgttatcattcctttcggggactgggagatcgaccataagccgacaaagcccgttatcctttggtgccacccggagaagaagccgtttgaccgcctgcacttagttcctgtccgttacggacagatcctgagtagcacgattttcgccaaggattatttcaaggagcgcttgcatgctttcatcgataacttgaacaccttatacgtcgcttttacccgttcgaaagaagaactgatcgtattctccccccgtccgaggaagatcaacaaggaaggtaaggttgagaagataacttccatcgccgatctattgtgggcgggggtggagacggatatcgaggatgatacctttgaaaggggcgaatggtggcatccagcttcgggtagaacggcagaagataccctggaggaaatccccatgagccgcctgtattccgtttccccggatgatcgtttacaattacgcctgcatgggaaaggattctttttcgataatgccaggcggaagcacggtaccttgatgcatgaggtattgagccggatacgtacgccgaaagatattcccgcttcggtcgaaagttatcggttagccggggtgattaaccgggaggaagcggcggagttgatcagccgtctggaagaattattgcaagcggaggaggtaaaggcttggtatgatggttccgcccgtgtcttgaatgaagtggatatcctgttcggtaaaggcttgtctaaacgtccggaccgggtgatgataaaagataacaaggtaattgtcgtggattataaatttggcgaacggcaagataagcgccatcctaatcaggtaagaaattacctgcaattaattcgtaaaatgggtttcgagcgggtcgatggatacctttggtacgtagagttaggcaaaatagaggcagtgaataagtgatatatttttgatattcggtaaaaatgaatatttttgcagattcttagtataaaacgatacagtcaaagaagaatgaaagtacataaagaaggaaccggtttactgcttacgttgtttacaatattatttattgtgaatataactttgtaccatacggtaggtaagggtatgctgttttattctgtcgcttttgtttctaccgtattgttcctattggtattaaacttcttccgtagtcctttccgtcggtttccttatgattcggaaggcttggtgatcgctcccgccgatggtacgatcgttgccatcgaggaagtgatggagaacgagatccttcataagaagtgcctacagatatctatctttatgtctatcttcaacgtacatgccaattggtttcccgtaaacggtaccgttaagcatgtttcccaccagaacgggcgttttatggcggcttatctgccgaagagtagtacggagaacgaacgttcggcggtcgtgattaccacgaggaacggggtggatgtcttggctcgtcagattgctggggcgatggcacgccgcatcgttacgtatgccaagccgggagagaaatgtcatgtggacgagcaaatggggtttattaaattcggttctcgcgtggatgtctacctgccggtaggaacagaggtgttaatagagatggatcaaaaagtaacaggcaatcaaacgcctatagcccgtttgtcaaaatgagtataagaaaacatattcctaatacaattacgtgtctaagccttctgtccggttgtgtcgccagtgttatggccttgcacggaaatcttttatctgcgttgatttggattattatagccgcggtctttgatttctgcgatggctttgccgctcgtttattgaaggcttactcgccgatgggaaaggaattggattccttgtcggatatggtaagtttcggcttcgctccgggcatggtggtctattggttgttgggagaggcttctacggctttgccttttggctctttgaatacgtatatcccttatctggcgttcgtgatccctacgttttcaggtttgcgtttggctaagttcaatattgatgaacggcaaactacctcgtttatcggcttgccggttccggcgcatgctttattttgggcttcggtgggatattctgttttaccggttatccatgcgaatgaaggcttgttcgtgttggtgactgttatcttggcgtttattacctccttgctgttggtgtctgagataccgatgttctcgctgaaggtgaaatccttagcgtggaagggtaatgagcttcgctatatattgatcgcttgtgccattattttcgtggcgttatggggattcttgggaatctctggaaccatcctgttatatatagtcttgtctatttttaacaaaaagggataaacaagaattcttatctttgtgtttgtgatagtaaagaatcatttaagtatcggattatgtttaagtttttgtttgtaatattctttttctttatcctgttggtgtttctgatgggtttctccatcttgcgtacctttaagaacatcttttttggtagcggaaacagcactcgtaagggagaacaacgtcgtcaaacaaatagcaatacttccggacatcgttctacgactactaccgcccgggacgatgatgatgatcgtacaccttatgtgcaccgtaagaagatattcgccaaggatgaaggggagtatgtggattacgaggaagttaaatagagcttagcgtctttgcttaaagaaacgctgcatttcttccgcgcactctttttcaaggataccttttttgataatcgctttcggatggaaggcttgaggggcgaatttggagaaacctcttttatcatcggatgccccgtatacgatcgtgcttaattgtgcccatccgatcgcgccggcacacattatgcagggttccacggttacgtatagactacaatttgtcaggtatttcgctcctaagactccggcggcggccgtaatcgccaacatctcggcatgtgcggtcacgtcgttcaagcattcggtttgattatgcgccctcgctatgatctggttgttgcagacgataacagctcctacgggaacctcaccctcggacgctgccgcacgagcttccaccaacgcttgcttcatgaaatattcgtcattgaaaggattcatcttctcatctcattttcgttgaaaagagtcggataatcctcctccaaggtcttgaggatgtgagaaaggatcgtctctcggtaccaacgggacttattctcgatcttgtagcgtgaaaggtaacgttttaccgctttatgctcttcgtcattcagcataaaggtcactttgtgtaccctcggatgattggggtgagccgatgaatatttacgttcttctttcatacatttgcaaatgtacgagtgaatagccgaataacaaagaaaatggctatatttgtgcaaattaatgcgatggcaagacagaacgatatgggtcgggaaggtgagtctgaggctcgtgcctatctggtaaaacatggatataacgtgttgcataccaattggcattggcatcattatgaactggatattatcgctgtcaaggaagatgagttaatcgtggtggaggtaaagacacgctctgaggattttttgctttcaccggaagatgcggtagacaccaagaagattcggaggattgtcgccgctgcggatgcctatgtccgttattttaatatagacttaccagtccgttttgatatcgtgacattgatcaagaaagagacgggtttcctgatcgaccatatcgaagatgctttctatgctccttgccgttaaaagataaaagttatgaatatagaagaagtacgtgaatactgcctttccttgaagaataccatcgagtgtttcccgttcgatgaggtatcgctggtctttaaggtagagaataagatgttcctgctgcttcctttggatgcggaggagcctcatgtctccttgaaatgtagtacggattatgtggaagagttacgggaacattatacggcggttgagccagcttaccattttaataagaaatactggaatagcatttatctggaccgggatatggaagacgaggagattaaacgctggatcttccattcttaccgggaagtgatcgctaaactaccaaaaaatataagggaaatttataatgatgagcactgataatgaatctccccgcatcttgcgtgtggcggaaaccgcttctacgaatagcttgcttcgtgagttggtcatcaaggaatctcttgcggaaggaagtgtggtcgttgccgatttccagacagccggacgtggtcagatcgggaatacttgggagtctgaggcgggaaagaacttgatgtttagcttagtcctgtaccctacgtgcatccctgcgaaccgtcagttcttgatttctcaaatagcagctctaagcgtgaaggaggcgttggacttatatgcggatcatatcaccgtgaagtggccgaacgatatttactggaaagacaagaagatttgcggaatgttgattgagaacgacctgtcggggcataatctgtattgctccatcatcgggatcggcataaacttgaatcaaacggtatttcgaggagatgctccgaatcctgtatctttgtttcaaataatcggtaaggaagtagatcgggaagaggttttgcaccgtttcctctcaatattctatcgctattatttatctcttctccaagaggaacacgaggatattcgagctcgttatcaatccgctttgtatagaagagaggggtatcatggttataaggatgagtccggcgagttcgaggcctgtatccatgatatagaatcaaccgggcatcttttgctagcattacgggatggaagcattcgccgttatgcttttaaggaagtctcttattgcaaatgactttttgatcggagtggttttttaccacgtatttttataatgtacacgtacattataaaatgtgtgtaatagtgtatatctgttggaggaatgaaccgaagataagtattgtggtattggataagagatggtttgtctttataatcggcggtttcgtaatgaatagcctatttgattgataagaaagcgtatatggtaacaaaaaaataatagggaagatttgcacgaatcaaagaaacgcgtacctttgcaatgatgaataaaaccgattgccctaagtccgtttaaaaggcaggcaatccaatagaagagcttattacactttagtattaatattaaattatttaattatgaacaaaaagttttctacgcttttgtgcgctagcttgcttttttcttcagcatttacagctcaggcacaagatttgagcggtgctcttaagggcggtgatgctaccgaaatgagtaagttgggttctacaacgccgaagggagtttatcaattaagaacttctgacggtgacattcttactgtaaatgataagggtgagtacaaattggtcgctcctgagaatttgtcagacgtgaagtcttctttgtggtgtgttcagatcactgaggcacaagacagaggacaacaacctatctatgactttgtgaacaagggacagagtgcaatgttggcgattaatgtgcctgatggcatgaaagttaatgaaacgactggtgctctttctgttggtgaatcttatggtggatgggccttctcttctgtttataaggaagacttagaaaataatcaaacattatatacttatcaagaggcagataatgtgttgattttattaccagcgggcgatggtattaaggctaagaaaatcaaagcgagtgaggctgagaattatccagaggcattgaagttcacgttgttcaacgcaggtacatatgtgttgagtgccgctgagattaatgcttatttgaaagaaaataagaatgtcttgaaatttaatccggacgctaacgcagatgtaaacccgttctctacaacagcttttgttgctaaaggtattaacagcgatactgatcataacttcgtgtatgtaacggataaagcaaaagaaaattcttatttgaaggtagatactgccgctaatggtgtaggtactcaattcttgaagtttggttggactgatgtcaaagctaagggttctgaggatgctttaacgtcaggtgaaatcgctaaccaacacaagttcttgtttacttacagaccttctggcgatagcttgttcattcaggttcaagaggctcgttatttgccggagaagagaacagagaatgactattggaaggatatgactccaattaagtacggtactgtatatcatgcggttacttgcgaaggaacagattcagctgattctttgttcgttaagttgcagaactttactgttgcggatcgtattgctacaattggcaaaaaaccgattaatacacacattagttttggtgtagacggctgtttcactagcacggacaagacatctgtaaacgatggtgtttatgttatcaagaacgctaagggtgaagtattggctgctcctatccatctgaacgacaacgttgctggcgaggctaataatgatgttcaatgggttaaattggatgctcaagatccgaagcatatgcctgcttatcaatgggttgtgttgaaaacaatgcattctgataaggctatcgaaacttctcctgttgtaattacgaaccgtgagttcccgcaatttacagcgactgttcaatttacgaagaatgagaaaggagagttagttggtaatgcatctatagataataaagtcctttctgctgttacatttgacgcattggaagaaagtttgattaaggatgctaagttgggttataagtatatttcagatgctgagttatctgtaaacaagtataaatttaactacttgaatccgtttactccggattattggatcgcaaacggtgatggcaaagactctttgctttatgtgaagaaagaggctagccgctatgagttggttaagggttctactgctgcttatggttataaggttactgatgaggctaaaaaatggatcaagggcttggctcaattggagagaactaactatgtagttaagttggctaacaccgataaatatttgcgtgaggagtctgtttatggccagaagtatgctatgggtgctatcgctacaccggatacattcttctttaaggagaataaccatgatggagcaaagcatttctatgctattcttaaatctcattatgtcgctaatgaggctggctttgactataagtatgctgcaaacattgaaaatgtggctactactcataaagtaggtatcgcagatgatggtaaagaggcaggtttgaaggttgagcttttgaatgagaagagaacttcttctttctcagtagaaccagacaatactccgttgtatcgtcgtttcaacaatgaattgttaggtgagaacgtaaatgatgcttctgatagcttgtattttgttgagtctatccgtaaagagtacttaatggatgagaacaacacgaacttgcaacattctacagtagactacgctggtatctggaataaagataaggctaatggtaaattggcattccgtgttgatactgcatggttgaaacgtggcgcaggcgagatcaaacctcaatacctgatttctgcattccaagatgtaatcgcaggtgagaagatcattccttgtacagaggatggcaagcacatcaaacccgatggaactccgacagataatccttacgaatgtgtacacgctgttcatattaagactccggcattcgtttatggtaagtatctagttaacttctctgattctgctgctacttgtgaagctgacgtaaatccgtttatcttcaatacgaaggctgtttctaacagtagctatactcgtgtaggttttgttcctgctgttcaatatggtgatacattgttagtcttgactggtaagtatgcaagcatgacgaaagagcaattgaagaacgagggtatcgaatctatgatcgctacttataagaaagaatatccttcatttatcaattacttgaatggtgataaccataagaatgtaacttggtcattccgttatgtaaatcctgaggctgctgctgtagcttatgaggatggcaaggaaggcgagaacaacgcattcttgatcgagtctaatgtatatgctgctggtgagaaatatcagacagtaaaaggcaacaaggatgaggctatcgcccctgaaaaggctgccgcttggttgaagatgcacaatggttgcttggtattgacagatgtgaatgctacattcgacaatgctaagactggtggtgacggtgcattggtattcaacgcattccagaagactgaaaaagaagatatggtaacttctaatgacgaaatcgctactgaaggcgtatccgtagtagcaggtaacggtactgtaactgttcaaggcgctgctggtaagtctgtagttatcactaacatcttaggtaaggttgttgctgagacagttcttacttcagacaacgcaactatcgctgtacctgctggtatcgtagctgtagctgttgagggtgaagaggctgttaagacaatcgttaaataagtagaaaactgatcgaatttccgtaaggaaagacacagttcataagatagagccccgtcgatgtacttcggcggggcttttgtgcgttcccctacgagtgtttcatatttaaatacaaaaacaaggtatcttagtttcattgagcaagtatcctaagttcattggcgaagtatcttaggcgtatggggcgatgaaactaagatacttttctcatgagcaccttgtgtgagtatcggtgttgtcatatgcgactaccggcgtggattgtaaggactactcgtgcaggttctaggctctactgccctgttattctttctttttgatagataaatgtctatatgtgtgacatcccttttcggtggagagcgtaaaatagcagaggctggatgactgtaaacggcatttttcattgaaaaagccccctttttgtacgtgataagtggtgaaagcctatgcgataggtcgcgttgggcaacgccggtagtgccgatgggcatcgtgaatagtcaagaatagggttgttgatacttgtggatgggcatcataaccttgttacgacccagttctaaccccataaaccccctcaagcaacccactaaatatgaattacaatgaatgaattccgctagaatgaaaggccgtttttcgataagacgctgtcatgtaaatgattgctgaaattttttctcgtatttgagaatgaactgtccatcagcccggaaaaatcgattctccgggacttgatattacaaattgtcaaaatggtaaacgtggtttagctatggtttctcgttagtcatatttatgggattcttgatatggtatattgtttattctgcttatatttacgatatcatggaagaaaggaaatggtttgaggagctaccggacttatgtccaccttcggatgctatggcgtgtagtggggtgttttatagaattgcggaaggagatcctgtgaaatcattggatttcttctcgcaaagaagatggcatgattaaaaagacattcggtgtggctcattattcttggtggcgatcttattgttttgatgtaaataaggcaaaggtaatgatgttatgactaatttgtttttagataggatcctagagttttatggtgtgcctcaaatccttgtggctaaagattcttttggtacgcaatacttatgcctgcttttcgatgatggggctggatgcaggtatacgggtattaagatttcatcctctaggctggatgattattggggaggaaggatcgatttaaggactctttatctgaatccggagaatgacaatgaatatttcaatgtgtcttataatgataatcattatgagctacagtcttttgagggaaaggccttgccggaggaaaggcttccggaaaagggatattttcatgtggaatcacggtctgagatctatacgataaaggttccttcctgcgataaaaatatattccaagacattgcccgaaggatgggatgggtctgtatgtaacttaaaacttcgttatcatttccaaaaaaacacctatataccagccttataaccccctatttgatttattctgcttatatttgcgagttatcaacagttagggcgatttatcaacaaaacaagcattgttttgattgaaccctgtttggttcagtttttaatgtttagttttgccctcgaattaattaggtatagtatgggaaagattatcgctttagcaaatcagaaaggtggagtcgggaagacaaccaccacgattaatctggctgcgtcattggccgctcttgagaaaaaggtgctggtcgtagacgctgatccgcaggcgaatgcctcatccggtctgggtgtggacatacgtaatgtagaactttctatctatgaatgtctggtgaacggtgaggacgcgagcggcgctatcacacagactgaagtggaaggactggatatcatcccctctcatatcgatttggtgggagcggagatcgagatgctaaacttggagaatcgtgaacggatcttgaagcagatattgacaccgctgaaagagaagtacgattttatcctgatcgactgctctccttctttgggattgataaccgtgaatgccttgacagccgccgattcggtgatcatcccggtacaatgcgagtatttcgccttggaaggtatcagtaagctgttgaacacgatcaagattatcaaatcaaagctgaacccggcactggagatagagggattcctcttgactatgtatgattcccgcctgcgtttggcgaaccagatttatgaggaagtgaaacgtccgttccgtgatttggtatttactaccgtgatccaacgaaacgtgaagttgagcgaggcttccagttacggtaaacctgtcttattgtatgacgcggattcgaaaggatctatcaaccatatgcagttggcacaggagattgttgaaaaaaataaaggattatggcagcattaaaaagatcggcgttaggccgtggattagacgcgttaattacgatggatgacctgaagacaggtggttcatcgtctattagtgagatcgagttaagcaagatccagcctaatccggaacaacctcgatccatctttgaggaagagaccttggaggagttggctacctctatccgctcgttaggcgtgatacagccgattacgttgaaggaaatcggccccgagcaatatatgatcatctctggcgaacgccgttatcgtgcgtcgctaaaagcaggtttggagcgtattcccgcttatattaagacggcggccgacgaaaacgtggtggagatggctttgatagagaatattcaacgagaggacttgaactctatcgaaatcgcgttagcttatcaaaaattaatcgataattacggcttgacccaagaggggctgagcgaaagggttggaaagaaacgtgctacgatcgctaattaccttcgtttattgaaacttcccgccgagatccaagtaggattgaaggacaagaagatcgatatgggacatgcccgggcattgatcccggtggatgatccggaggttcaattagctttatatgagcagatattggctcaaggactctccgttcgtaacgtggaggagatggtgcgtaatatagccgagggaatacaaccggaattgccggaaaagaaaaaatcggatcgtaagccgatacttccggaagagtttaaattgctgaaagatcatttgtcccgttacttcaatacgaaagtccagttgacttgcaatgagaagggaaaaggtaaaattacgattcctttcgccacggaagaagagttggagcaattgatcgggttactggataaattgaaatgagaaatcgaatcatactccttttgatcggattcatgtgctatgccgggatgggtaacgcacaggaggataagacggagaaagccgttcctgctatagtttccgattccgtggaggtagctgccccggattctaccgtgcaagccgtcttgatggcggccgattcggtgggtgtaccggaagtgaagatgaagctggcttttaagccgaatccgacaaaagcggtcttgttcgccttggtaccgggtctgggacagatctataaccggaaatattggaaattaccgatcgtttacggtggcttgatgggatgtatgtatgccgtgacttggaacaacaagaactataaggattattcgacggcttataaggatatcatgtatgatgccgctaagaatctggaaaatccggatgcttggagtaaaagttggcaagacttgacttccatggctcctgaggatgcgattaataattcaaatttcaaggatcaattgaaaagacagaaggattattttcgtcgatatagagacttgagtataattattacggtcggggtgtatgcgttgagtatcgtggatgcctacgtggatgcccagttattcgattttgatatatcaccggatttatccttgcatttggagccggttgttagtccgaagacgagtgtcacgcctcgtacttacggattaaattgcagtctaaaattctgatatacatgaaaagatacctgctagcactcatttgtttaaattgtttggtctcattggtctatgcgcaggaagagacccgaattgaggaaaaagataccttaagctcgctggagtctgaggtcggattgattccggaaagcttggatgcgaacgtggatagtttgctccgtacttggcatgtgcaatatttctcaaaaagagaggacttttgccatgatgacgacgagaatgtctatttcccggattcggtctatatcgaccgcctgtctaggcttcccagcgtgatcgctttgccctataataatatagtgcgtgattgtattgacttatatgcggagcgtaaacgaaatttagtgcgttatatgctggggatggcagacttttattttccgataatcgagcaggtgttggatgagcatgacctgcctattgaattgaaatatctcgccgtcgtggaaagtgccttgaatccggtagccctctctcgtgtgggtgcttgtggtttatggcaattcatgcttcctacgggtaagagctatggcttggagattaatagcttggtggacgagcgccgggaccccttgaaagcgaccgaggccgcttgtaagtatttcaaggatatgtacgctatctatggggattggaatttagtgttggcatcttataactgcgggccgggcaacgtgaataaagcgatccgtcgttcgggaggcaagacggacttctgggatatcttcccttatttaccgaaagagactcgttcatacgtccccttatttattgccgccaattacgtcatgaattattattgcgagcataacatctgtccgatgcaaaccagcttgccgctagccacggatacggtcatggtgaataatgccctacatttgcagcaggtatcggatctattgcaagtagatattgagacgttgcgtgcgttaaatccacaatataaaagagacatcgttccgggtaatacccgcccttcggttttgaaactacctgcggcggaaacctatgcttttatcgataaagaagatacggtctatacgcatcggatcgaggaactgttggcgaattgcatttctgcgaataactctaatggctctttaccaagtggtgcgacccgggaaaaaatcacccacgtggtattgagtggtgagaatctttatacgatcgctaatcgctatggcgtgacagcgaaagatatccgtaaatggaacgggctaggctccaaccgggtagcgaaaggaaaacggttaagattatatgtagataatgggggtgtcgcttttgcctcggctaccaagactccggtgaaatcaactaccgtgactgcgaaatcgactgcgacaacaacgaaaaagtcggcttccgtcgctacaaaacagatcgcttccgctaataaagattttgtctcttataaggttaaatcgggagattcgctttattcgatttccaagaaataccctggggttaccgcctcttccttacaaaaggtgaatgggctgtcaagtccggatatccgtccgggtcaagtactgaagataccggtaggatgatcattcggggataattcgtctttaactcttttttttcgctttcttcctgcactggagaaggatgtgaatgattttttattcctttgtatacgaaaaaagatacaatcgtatgggttcattggatgaaaagatatcagtggtcaaggctaaaccttggttggtcagtttggtttgcgcggtgtttatcgcctacccgaatttggcatggatcttttgtgacatgagctatctggctccgaacgatcatcaaggatttttactcttctttgggttccgttttctttacttctggggacttatttggtttttgctgaaaagtaacttgaggcatgaggattgtacctccttcttcgagcggttgctctggaatgccctgtacgtttccggaggctttgttgtctataaattgatctccttcctgactattagttatgatcgttttttgagtatcattatcttccagtttatcgtgttggcgttgttatgtaccttgatcggctatatacaaatgctatatcacaatcaacgggaaaaggatcaattgatcgagaatctgcgtgtcgagaatttgcagagccgctgcgatgcattggtgaaccagatcaatccgcatttctttttcaattcattgaatggaatctcctccttgatacggaagaaaaacgatgagaataccttgttgtatgttacgaaattgtccgatatattccgttatatccttcagagtgataaaaagaatttggtaccactgtcggaggagcttgcgtttatagaggcttttcagcatgtaatggtagtccgtttcgccaataagcttacttttacgatcgaagttcccgaagataagcggaacttgcgaattcccgtattatctttgcttccgttggtagagaacgtgacggtacataatattatagacagcgagcaccggatggatatcttgatccggctgaacgagcgaatggaactggttgtttctaatccaatctatccgaaattgaccttaccggatacgaatggaaccgggcttaagaatctggagaatcgtttcttgctattaatgaataaacaaatacgggtagaatctgatgaggatgagtttcaggtatacctacccctaaaatgatgctatatgagaatactgatcgtagaggacgagaccgccgcctatgagaacttagcggatatgttggttacaatagatcccacgcttgagatcatgggaaatacggagagtgtccagcaaacggtacgttggctgcaagccaatccgaggccggatttgatttttatggatattcatttatcggacggttccgctttcgctatttttgaccagatagaggtggaggcaccgattatctttactacggcgtacgatcaatatgcgatcgacgctttcaaagtaaacagcatagactatatcttgaagccgattaagtcggaagaattgaaaagggccttagataagtttagccgatggaatcatcaagatatcatccattatttatcccaattaacacagttgtctactactcctaaatacaaggataaactactgattcctattaaggataaattgttgcctattagcttgaaagatgtgtcttgtttctatacggctgataagaatacatatgtttatttaaagagtggtaattcgtatccatatgctaaaacattggaacagataatttcttctttaagtcctgctgattttattcgtgcgaataaacaattcatcatttctcgtgatagcgtgaaggacataacaatttggtttgatagccgtttgctcgttactttggatgtagaagtgcctgagcgtatatatattagtaaaaataaagcatccgagtttaagtcttggatagtaagtctggaataataattaaatagaaatgccggttctcttaaagccggtatttttttgcccttttcgtgttcaatccccattttttccttttcgtcaacaatcggaaacttcctatccgataattcttcatctttgcaatacaaacaaggagatacatcaataagatgtaagttgaaattttgatgttaatccgagttttatcatacacattagataggttaataggtttgtaaaaaaggattagtccgaaacaaaagaatgtttaggctatcttctctaaaatgagtgtttgttttgtaaatggttttgtaataggtaaattgtaggtattatgagaaagttaattatggcggtagcggttttgggaatgagtgctacaatgaattttgcgaaagcgcaatgtgtgaatgaatatgggaataaagaaccgtttgcggtagagtttagccgattgagttcttatctaggattggctccttaccaaatggaggaggtacttaacattaatgattattttgtacaagaacaaagaaagagtttgagcaaagacctgaagcgtcaggatgaacgattgcaaaaagccgtgtacggcaatttgaagctgatgaaagaggcgttgacagccgatcagtatcgcaagtatgtcatattgttaaatgtaactaacaacaataaccgattaaccggagctgtgacatttacggatatctatttggctgagaataaatgagtgtaaccttggctcgatgtgatgttgattagaaaggcgatccttgtgtcgaacagggatcgccttctttgcttctgtccttttccttttggaagtgcgctatcagattttagcgaaagcttgatccagatcatctataatatcatctatatattcggttccgatgctcaagcgtacggtggatggtgttatgtgctgttgggcaagttcttccgggctcatctgggaatgagtggtcgtgtatggatgaatgacaaggctctttacatcggcgacattcgctagtagggaaaagatctccagtgagtcgatgaatttccaagcggcttcctgcccgcctttgatctcgaaggtgaagatactgccggcaccattcgggaaatatttattgtaaagttcatggtccggatgggtaggaagtgatggatgattcactttttctactttcggatgttttgataaataatccacgactttcaatgcgtttgctacatggcgctccacgcgtagggataaggtctctaatccttgcaacaatataaaagcattgaaaggagagatcgttgccccggtatcgcgaagaatgaccgcacggatacgggtgacaaaggcggcggaacctgctacgtccgcaaatatggctccatgataacttgggtctggtttagctaatgtagggaacttatctgcattcgctttccagtcgaaagtacctccgtctacaattacacctcctaggctactgccgtgtcctcctatgaactttgtggcggaatggatgacaatgtcagctccatgttcgatcggacgaatcaagtagggggttccgaacgtattgtctacgattaatggaacatggtatcggtgagcgacttccgctaccgcatccagattcgttacgtcagagttaggattcccgaatgtctctacataaatggctttcgtgttttcccggatggctgcttctaatgcgtttaggtcatttacattgataatcgtattagtaatgccttgggaggccagtgtatgggtgatcaggttgaaggaaccgccatataaattatcggctgcgataatatgatctcctgccctcactatgttctgtaatgcataggtgacagccgctgctcctgaagccacggccaaacctgccacacctccttctaaggcagctacacgtgcctcgaaaacgccttgcgtggagtttgtcaaacgtccgtaaatattccctgcgtcacgtaggccgaaacggtctgccgcatgttgtgcgttatggaatacataggaagttgtttgataaatgggtaccgcacgtgcgtcggttgcgggatccggttgttcttgtcctacatgaagttgtaatgtctcgaaatgtaacttctttgttgccatagtcatcttgtttatttagttcttattctgttggcaaatgtatgatgtgtgtgctttttgaacaagattcgttgagaatatagaaaataatactatttttagggctataaatagaatacatcttcggcgaaggacgctggggaatcaatccgatagaatttttttcttatgaatgtttctgataagttagacaaggtggatctgcaaatcctccgaacgttacaagataatgcccggttgactacgaaagagttggcggcaagggtcagtctctcgtcaaccccggtgttcgagcgtttaaaacgtcttgagaatagtggatatataaagaagtatatagcggtactagatgcggagaagctgaatcaaggctttgttgtcttttgtagcgtgaaattggttcggctgaataaggatatagcttttgagtttacccggattattcaagaaatccccgaggtaacggagtgctataatatttcaggcgattatgattacttattgaagatacacgctcccaatatgaaatattatcaagagtttattttaaatgtgttaggaacgatcgatagtttgggctcgttgagaagtacttttgtcatggacgaggttaaacacgactatgggatccatatttaagcagtagatattctatttttgtcttttgttagggtttccttccaaatatttgtatatatttgtggctatacagtataaaaatgggaggtgtaaaaccatggacgatacaaaggacacaaaagatataaaagaaacgggcgaggctgcgtccgttctctctgtggacgaacagatgatacaagatgggttcaatgcgttgttgaacgattatttgaagtcaaaccaccgccgtaaggtcgaacgaatcacgaaagcttttaatttcgccaatcaagcgcacgccggagtgaaacggcgttccggcgaaccttatataatgcatcctatcgccgtggctcgtatcgtatgccgggagatgggtttgggctctacctctatttgctctgcgttattgcatgatgtcgtggaagataccgagtatacggtggaggatatccgggatatgttcggagacaagatcgcccagatcgtggatggcttgacgaagatatccggtggcatttttggggaacaggcctcggctcaagccgagaacttccgtaagttgctgctgactatgagtgacgatatacgggtgattctaatcaagatcgcagaccgtcttcataatatgaggactttgggttccatgcttcccgccaagcaatttaagatcgcgggtgagactctttatctgtatgctcctctggcgcatcgtctgggtctcttctcgatcaagacggaactggaggatttgagttttaaatatgagcatccgcaagaatatgacttcatcagcgctaagttgaaagcgacagaagagagccgtaataaattattcgagcgtttcgccgcccctgtggacgagaagctgaaatcgatgggacttcagtatgagatgcgtgcccgtgtgaaatcggtctattccatttggaataagatggaaagcaagggtgtcgctttcgaggatatttatgatatttatgcggtccgcattatttttgacccgcttcccggtgtggacgagaaaaaccaatgttgggatatctactcggctattacggatatttaccggattcgtcccgaccgtatccgtgattgggtgagccgtccgaaagcgaacggttatcaagcgcttcatctgaccgttatgggaccggatggacaatgggtagagatccagatccgtagccgccgtatggatgatatcgcagagaaaggcttcgctgcccattggaaatacaaggaatccaacgtggaggaggatacggaattggataaatggatacaaaccattaccgagatcttggagagtccggacccgaatgcgctggatttcttggatacgatcaaactgaacttatttacttccgagatatttgttttcactccgaaaggagatataaagacattgccccaaggggctaccgccttggatttcgcttatgcgcttcactccgatatcggtaataaatgtattggcgctaaggtaaaccatcgtttggtgccattgagtcatccgctgtccagtggagatcaggtggaggtcttgacttcccgttctcaggagccgcaaccggagtggttgaacttcgtgactaccgctaaggctcgtgcgaagattgatgccgtattaaagcgtgtccgtaaagaggtcgctaagtatggagagataaaagttcttgatgccttcaagcgttcggagcttgaggcgagtacatccaatctggataaattaggcatgtactttggattctcgaaacgcgaggaattcttttatgcggtagagaagggggatgtggttttgcccgagaatttaaagaagctgttgaaggagaagacggataatgtcttgtttaagtatgtgaaacaggcgttgggtgtcgcttccaagaaggtgaaacaacccgaagaggaggaagccaagaaagagaagcctaaatatgataagaaaaagccttatttattgaaagaggaggcttttgagcgtaattatgtaattgccgaatgttgtaagccgattccgggagatgactctttaggttttatcaatgatgatggaaatgtagtagttcataaacgttcctgcccgatcgccatgcgcttgaaaagtagctttggcgaacgtatcttgaatacggtttggagcagccatatgaacgcttcttttgaggccacgctagaggtgaaaggtatagactcgataggcgtattgaatacgatcacgaaaacgatttccgaggatttcaacgtgaacatcatgcgcttgctgatcgaggcgaaagacggcgtgttcgaaggtaagataaagatgaaagttcatgacgtagaagatatccagaaaatgtgcgtgactttgtcgaagatacagaatattaaatctgtcggacgtgtagcggattaagtgtaggataagtagggagcattgtttactatagttcccgtggaactatagtaaacgtttatcgtttacgcacacacactcatatgccaaccgattacgatacaaatgtaatattattttttttaacattatacatgacttaggacaaatacatcaaattatttactccgactattcctccatcctgtttaggtcgagcctctcttgcttgatataggttacccaatagctttaggtataattgttcatatcatccagtaataaacatttttttcgctatatacaaacctacttgtcacttgatctattccttaatgatcgccgtgggatgtacaaaccaagtcgcgatctgtatattccatgatgtgatctgtacagaccacgccgtggtttatggaattatacggcatgcgaacaagaatctatacgctaccaagtaagaattcatacaggagtagagcgttattaagccgcattacgtttcttataaaggattttacttactcctattactttcaacttctatagttccacgggaacttgccttcctaatacatatttattaatgtatagtgtttttatcaatgagattaatgttaatttaaatgtatgcctatgaagaatcagacaagaatgtgattaatacctgtgaaatgtgtaaccttatttcgtgaataattaattcaacaaactattattatcaatatgaataaaatatctaaactattttctttaaggaatatagcgagattttctgcacttagtttgctggtgtccgcgttctctacgacagatttggcggctatgggagcaaacgagactaatgtgttgccggtagtgaatgtcgctcagcagagtaaaagtgtttccggagtagtcgccgacaagtctggtgagccgattattggcgctaacgtagttgtgaagggggcgaacgtgggtagcattaccgactttgatggtgctttcaagatcgagaatgtacctagtgctgctatcctgcaaatctcttatattggtttcaagacgcaagagattccggtaggaagtaagtcttctttcaatataacgctagaggaagattccgaaactttggatgaggttgtggttgtcggttatggctcgtccgtgaaaaaggacttgactactgctgtgaccagtgtgaaaagcaaggatttcttggcgggtgccgtgaatgatgcgatgcagatgatcgatggtaaggtggccggtgtatcggtaaacagtgcggccgctgccgacccgaactccagctctagtatccaagtgcgcggtgcttcttccttgaaagcgggtaatagcccgttagtcgtaattgacggtatgcccggtggcgaccttcgtaacatcgcacaggcagatatcgagtcgatcacggtattgaaagatggttctgccgctgccatctatggttctcgcggtgccaatggtgttatcttggtgaccactaaacagggtaaggcaggtaagactactatcacgtatgatggatacgtagagcatgatttcgtggcaagtcggccggatatcttggatgcggatgagtatttggagaaggtgaccggtgcgaaggattatgggtatcgtacgaattggtacgatgaggtgctgaacaaggataacttcggacataaccataatatctctttatccggaggtagcgagagcacgatcttccgtgtttctgccaactatcgtcagaaagggggactcgatatcgcttctaatcgtaaggaatatggcttgcgcggtagtttcaaacagactacgttggaaggcttgctggaagtaggcggtaacttctcgtaccgtgtggccgatgaggattatacggattatggctctttcaagcaggcggtccagttgaatcctacctatagcgtagacgagatggacgctttcaagggcaacagttattcttataatccggtgaagaacttgaccgagcgtgaccgcggagctttgcaggaatactcgatcatcgacttgaacgcgaagttgaatatcttggataacttgagcacggagctgaaactcggtcgccaagggcatagcaagaaagagcaagactataagttcaagacattccgcgagtgtatcgatggcggatacaatggctgggcgaagatcacgcaagagaactggacggactggacgttggagtggttgggtaactacaactttaagatcaacgaggtgcacgacttcaagatcatggccggttactcttaccaagagtttaattacgagaaattgatggccaacaaccgtaactttccctcagatgcgttcatgactaattatttgcaaggtggcgattatgagaaggtaagcggtcgtcttggcatggaatcgcaaaagacgcaggagaagaccatcgctttcttgggccgtatcaattataactggaacgacattttcttgttcacgggatcattgcgccatgagggtaattccaagtttggcgtggatcataagtggggtactttcccggcggcttccgccgcatggcgcatgtccaagctgcccgtgttcgagaatagtggaatggtagacgacttgaagcttcgcttctcttacggtgtgaccgggcgttccggtttcgaccgctatctctcattggccaagtactccggatatggagagtactatagcgatcagttcggctggttgcaggggtatggaccgggcaataacccgaactatgacttggcttgggagaagcagatctcttacaacttgggtatcgactataccttgttcgaatctcgcttgtctggtagcttggacttctttatccgcgacggtaaagacgtgatcggtgattacaaggtgcccctgcctccttatttgcacgagtctatcgtggccaacgtgggaacaactacctccaagggcttcgagttccaggcgaattgggatgccgtgcggacagaggatttctcttattccacgaacgtgatgttgtcttatacgacctcaaaactgaaatcattctcgaatgaaaaatatcagttaggtttcatcgagggcgaaggtttcccatctccggggaacccaggatcagcccagcgcttgcaggatgacacgcctatcggttctttctatggcttccgctacgcaggtgtggatgatgctggcaatatcttgatctggaaaggtggagagatcggcggagatacgaaactcggctcggatggtgatgagaaagataaggtgtatctggacggtacgggtgtgcccaaatgggagttgtcgtggggcaataccttcacgtataagaatttcgacctttctttgttcttccgcggacgttttggatacaaggtgatgaaccaatatgaaatgtattacggtttgcaagtggttgcgggtgacaataagctttcttccgcttacgaggagaacgcccatattaagggtcccaaagtgatttgcgactacttcttgcagaatggcaactatttgcgcctggataacatcacggtgggatggacaccgaagttgaatacgaaatggatctcaagcttgcgtgtgtatggaaccttgaagaacgtatttacgctgacgaagtattcgggcgtggatcctacgaccgtaacgacaaccggtttgtggccgggcattggtggcatggatgtatatccgaccgcacgtaacctgacgtttggtgtacaaattacttattaatcttaatcaaagaaatagacatgaaaagaatcaaatctatagtatgcggtacggtaggtgcattggggctgttggcgatgacatcttgcacggacttgaccgagacgatatattcggacttgacgaaagacaactattatacggataaggcttcggtagaggcggccgtggtgcgatgctttgaacatagtgataacgtgacatggcgtggtgacatctggaaattacaggagcttaccgctgatcatttcgtatggacgcaaaagggtcgccatgggtatgacgatggtatgtggattcgtttgcatgagcacaaatggaattatatccaggcgcagatcaatggagggtgggtacagtcgtaccagtgtatcagccaggtgaataccgtattgcgcgacttcaatacgttagatttcagttcgatcggtgtgaccgatgaggagaaagccgcttatttcagtgatttacgtgtgttgcgggcttggtactacatgttcttgctggatttcttccgcgaggtgcctatcgctactgagcagcagggtgcggaggagatcgttgcgcaaagcccggctaaggatgtgttcaattttatcgagtctgaattgaaggatgcgcttccttccttacctaaggagaaacgtatcggtcgttggacgcaaggccctgcggcaggtttgctagttcgcttgtacttgaacgcgaaggtttgggttggagaggatcgtatggccgactgtaagaagtatgcgcaggatatcatcaatggcgtgtatggatcctatagcatcaatcagtctgattaccgtgatccgttccgttcgggtatcaatggctaccagtctcctgagaacttgtttgagttctggcacgagcgcggtcgtttggagcaacagacgatgtgggcagacggaatgcactattccgcagctcagacgataggtagcgatggaggaggtaacaacggtattcacttgcaaccttcccgcgatttccaaggaaacgtgtaccaattcgccagcgggttgggtaatccgttcgaaaaatacgctaagtgtgattaccgcgtgattccgttccataccaccgatgcaaacggcggttatgagggcttcttcttgcaaggcatgcaaatgcagtacgacaagtccaaacaatatggtttcacggatcagtacgtgaacggctctgaggaatatgccggtgttcctttggtattcgtagaccaagtcggtcgtttctccgagcaagcagagttgaagaagaaagacggtgagagcgatgaggcttataaggctcgttttatcacttacatgaaggaggtggccgagcgtggttatttcatttgcaatgacgcggatgtgatcgctaagaagtcgcaggttacgaccggtgaggagaattccggtatccgtttcaacaaattcccttatttgccagatcacgacgggttattccgttctcaatccacgccggagatgcgtttggccgagatctactactccttggctgaatgttattacagagaaggaaataaggcgaaagccgctgaattactggattatgtgcgcattagaaactatcccaccgaggaatggagcaagtacagttatgtagctaatcctgccaaactgaccgatgcggaattcttggatgagtggggacgcgagttcttgggcgagcgtcgccgtcgcgtggacttgatccgttggggtaagttcggtgaggcttggtggaataaggagaaagatccttccgataaggaatatacttatttcccgatcccgcagaaccagttgaatgcaagtcctgtcttgaaacagactaccccaggctgggagtaaattaagtttagtattgaaaagtaggggaggagcttgccggaaacttcagacgttgttcggacgttgtaccggcacttcctttctgctataaaacaaaagtgtagcacttcgctacacttttgttttataaaagctttatcagccgacaatcaaataagttatataagctatataacaagcgatcaataggattccctccggcctagtgatggtccgtttcttgaagaaaaggccaaaaatataaagcaatacgcatgaaccgatcatgacgcccaaatccagattggtaatgccttgtatgttcatcggcgtgattgtcgcgctacaacctaatacgaagaatatattgaagaggttggaaccgataacatttccgatcgccatctccgggttcttctttaatgcggccacgacggaagtcgctaactcaggaagagaggttcctccggccactaaagtcaaaccgataatagattcgctgacacccagtccacgggcgataccagaagctccatccacgaaaaattgtcctccgtaaatcaaaccagccaatccaccaatgatgaataaactcgctttccaaatgggcattattttaatcgtgctctctccattttcctctccattatgtgcgatcgcgaatgtatagccaaggaaaatggcgaagaagcataatagtaacattccatcgctactactgatactattgtgcgatgcgccgttgatcaaaacgtcattcgcacaaataaataatacgattgaggcaagcacgcaaagagggatctctttgctcaacgtacctttcgtgacgctgatcggtacgatagcggccgtacagccgacaatcatcaaggcgttaaatatattgcttcctactacattaccaatagcgatatccgagcttcctttcaaggcggatacgacactgaccgttaattccggtgcggaagtcccaaacgccacaatagttagcccgattactaagctggaaatattgaagcgtttggctaccgaggcggcaccatctgtcaaggcgttagccccgactaaaattagtagtaaaccgccaattagtaatacgatatccattagtctttagaatggcaaatcatcgattggattggccggtccgaaatcaggagcggatgaggctggagccgtaggagcggaagccggagcgaaattatccggagttactcccatcggagcggcttgaggagctgccgccatcggacggtctactttccatgcgttgatactggtgaaccagcggccttggtactcacggctgtcaatgtcgaaagagactgtcaattcctcgcccggctgaatggccgcttgagcgatcttatccgctccgaatatctggaagcatactttcttgggatattgatcgtgtgtctctaatacgtactcttgttttttccattcgtttccggctttgctgataccgcctacttccggtaggacctgaatgatttttcctgtaatttccatgtcttgtattttatttacttatgttttatttaatgggggacgaaggtacggttttgttctgattttatcaacagaataatcacactttcggggcaaaagcatcgaatgcgtctttcatagctaacagctcttctttgatctgtttcaggcggtttacgatctcttcttggcggatcgtcgtctctttattgtccttcagtttttgccgtgcgccggccaaggtcatccctctctctttaaccagatggtagatgaggcgtaccgcgtcgatatcctcctgcttgtaaaaacgggtacctttgctcgtcttccttggattgatgatatcgaactccttctcccaaaagcgaagggtggactcgttcacgtcgaacatctgcgccacctcgctgatggaaaaatagagtttgagatctttattcttttttagactcatactgctaatgaagtttaatccataacctgaccatgattctcggcaatctggatcatacggtcgtattcctcaggtgagagatccatgtaatagtatttagatgggttatcatacttccctcgtacgattacctcataatgcaagtgagggccggtagatttcccggtatttccaacctcgccaatcacctctccacgagtaaccttttgtccgacacgtttcttgaacttactcatatgaccgtataaagtctgatagccgtagccatgatcgataatcaaacaatttccgtatccctgtttccaagcggcgaaagtgacaacgccattacctgtcgcatagatctccgttcccactttagccgagaaatccattccggaatggaaacgaggtgtacggtaaatcgggtcgatacgtacgccatagccggaagcggtacgacgcagatccttattggaaatcggctggatagccgggatacatttacttctctcttcttggttctttcctagggagatcagttcctccaaggagttggactggatatataattgcttacgtagcatatccatcttttgggtcgtggagacaacaagctccggattggacaggctcatcaaatgctcgtaacggtttgtccctccaaacccggctttccgaacggattcgggtatagactcagcttggaagatagcccggtacagattctcgtcacgctgttggatatcatccaatacgtccaacgcgttatttaagcgaagggaaagcacctcgtattgagtttgcaataggcggttctccttacgtaactgagattccatcggagagtccaccaaatgcatcatgacgaaaaaagtggctacgccgaatgctattccggtgcttaaatggcggagaacggtgaacagccggtctttgctagatgggtatacacgctcataattgagagtgttcggattgtataaatagtatgttttgcgacttttaaagagtttcatctacattttttgttatctgaatgcacgcaaaaataataatttgcagtacttttgcaaattgtttttcagaatattaacgagaactatataaatagattatgttgacagcaaaagaaatccgtgaatccttcaagcaattcttcgcttctaaggaacaccagatcgtgccttccgctccaatggtggtaaagggtgaccccacgttgatgtttacgaacgcgggaatgaatcagtttaaagatattatcttgggcaacgtgccccgtaagtatcctcgtgtcgcggactctcagaaatgtcttcgtgttagcggtaagcataacgatttagaggaggtaggacatgatacctatcatcatacgatgtttgagatgctcggaaactggtcgttcggagattattttaagaaagaggcgatcaactgggcttgggaatacttggtagaggtattgaagctgaatccggagcgtttatatgccaccgtattcgagggaagccccgctgaaggcttagatcgtgataacgaagctgctggttattgggagcaatatttaccgaaagatcatattctgaacggtaacaaacatgataacttctgggaaatgggggatacgggtccttgcggtccctgttccgagatccatatcgaccttcgttcggacgaggagcgtgcggcggtcagcggcgccgatatggtaaataaggatcatccgcaggtaatcgagatctggaatcttgtatttatgcaattcaaccgtaaggccgatggttctttggaaccgctgccggctaaggtgatcgataccggtatgggattcgagcgtctgtgtatggcattgcagggtaagacctcaaattatgatacggacgtattccaaccgattatcaaggtaattgcgggaatggcgggtacgacttacggtacggataaacagcaagacatcgccatgcgtgtgatcgccgaccacatccgtacgatcgctttcgctatcacggacggacagttgccttccaacgctaaggccggttatgtaatccgtcgtatcttgcggcgtgctgttcgttacggttatacgttcttggatcgcaaggaagcgtttatgtataagcttttgcccgtattgatcgagacgatgggcgacgcttatccggaattgatcgctcagaaaaccttgattgagaaggttattaaggaggaggaagaatctttccttcgtaccttggaaaccggtatccgtttgctggataagaaaatggaggagacgaaggctgcgggcaagacggtcttgaatggcgtagatgcctttacattatatgatacctacggattcccgttggacttgacggaattgattcttcgtgagaacggcatggaagccgatatcgaggagttcaataaggctatgcagaagcagaaagagcgtgcccgtaacgccgccgctatcgagacaggcgactggatcacgctgaaagacggtgaatgtaagttcgtgggttatgatttgttcgaatgcgaggcagagatcttgcgttatcgccagatcaaacaaaagaataaagtattataccagatcgttctggatcaaaccccgttctatgcggaaatgggtggacaggtcggtgatacgggttggttgatcgccgacgacgagaagatcgacgtgatcgatacgaaacgagagaataatttgccggttcatttggttactaaactaccgaaggacgtaacggctacatttaccgcgaagatcaacgtgaaaaagcgtatccagtgtgagtgtaaccactctgccacgcaccttttgcatgaggcgttgcgtgaggtattaggtacgcacgtagagcagaaaggttcgtatgtttcgcctgattctttacgtttcgacttctctcatttccagaaagtgacggacgaggaaatccgtaaggtggaaatattggttggagagaagatccgtgcgaacttcccgttggaagagcatcgcaatatgccgatcgccgaagcaaaggcgctaggggctatggctttgttcggtgagaaatatggcgatgaggtacgtgtcgtgaaatacggaagctccgtggagctatgtggtggtacgcatatcccggcaaccggtatgatcggttctttgcgcgtgataggagagagctctatcgccgcaggagtccgtcgtatagaggcggttacggccgagggcgccgagcaattcgtatatgcccagcaagatctgatccgtgagttgcgtgcgttgatgaaccatatgccgaatttggcgcaagcgatgaaaaagtctatcgaggagaacgccgagatgaagaaacagatcgaggattatatccgtgagaagtctatgcgtttgaaagaggagatcgtggcgaaagcttcggagagcaatggtatcaaggttatgcagttcgttggtaaggcaaatgcggacgctatgaagaacgtggctttccagatcaaggcggagacaaccgatagctttgtctttgttgccggtatcatagacgataacaaatgcacgctcatgcttatgttaagcgatgatttggtgaaagagggcttgcatgccggtaagatcgtaaaagaggccgctaagcatatccaaggcggtggtggtggacaaccccatttcgctacggccggcggtaagaacatggagggcctttccattgcggttggcgctgtgaaagaggctgttggagtacagtaaaatcggttcggaagaaattgacttttctttcggacttaatgatagattccttcggatcgaataagaattccatccgaaggaatttttttatgtcgttttgataatcggaatacatgttttacctttgtggtctaaggttttaaataaaaaagatatgtcagagcaaaaagtggttatttgcaaggacctgaaatcggaactgcaagattttctctcctctctaaaatacgataagttgttcatccttatggatacgaataccaaagagaaatgttttcccttggtagaggatataccggcctttcaaaaggcgccgattctcgtgatggaagcgggtgatatgaataagggttttgtctcattagcccagatatggacagctttgtcgaatgagggggcttcccgtaactccttgctggtgaatttgggcggcggtatgattacggatatgggtggttttgccggcgctactttcaagcggggcatccgtacgatcaatatccctacgaccttgatggcgtccgtcgatgctgcggttggcggtaagacgggtataaacttcaatgggttgaagaacgaggtcggttctttttatccccccttgtgtgtattcatcgattgcgattttttgcgcacgttggatcgcgataatatcctttccggttatgcggagatgatcaagcacgggttgattagttcgatggagaattatgcgtctgtcatgctttttgatatcgacaccatgaattattcgtatttgaatagtttggtaggccagtcggtcgccgtgaaagagcggatcgtagaggaagatcccaaggaacaaggtattcgtaaggcattgaatttcggtcatacgatcggccacgctttcgagagcttgtctttcctgaaaatgcgtccgatcttgcatggtcatgcggtagcggcgggtatcgtgagcgagctttacctctcgcataagctgtgtggcttcccgatggagaaattgagtcaagtcgtttattatataaaagagtattatccggcgctcttctttgactgcacggactacgataccttatatgagttaatgacacatgataaaaagaatgagggcggtatcatcaacttcactttactgaaaaatgtaggggatgtccgtatcaaccaatcggtcaccaaggaaaaaatcttggagtctcttgatttttatcgtgaaagttttggcatttaacggaaaaaaactacctttgcacccgtaaaataaaagcgggatgtagctcagcccggttagagtacgcgtctggggggcgtgtggtcgctggttcgaatccagtcatcccgactaaagctgagagaaaaggagttaagtctatggcttaactcctttttttgctctctatcactttcctaaaacaatgaggcagtagaaattccgactcatccgatattcatgggggatagccttaaatcatgacaatagattaaaattgatatatttccgtttgaatttagtgcggtcattccagcctattttagccattatttctgttaatggttgcttagtgccgacttatcggtgcatgctctgtgagttcaaagtcttttggggcacgattgtttatcggagtagggaggcctagctgtttgatagagtgccattggctgctgaagtgaataactaacggcttgtcgaatgaataactagcggctatatatagccgctaactaacggctcgggaagtgaataactgatcacttggaaagccttctacggcctgcgaaatcaagtatgcgttaacctagaggaggatttttggaaattatattatatatgtacacgtacattaaagaatatgatgtatatgaataggctttagtaatacataccaataatatcaaggactgatttatctaataaaacggctaatataaacgatcgttttaattcgtcatttgcaaaggtacgcgtttctttgatacctacaacccttccgagctatttttttcatcccttattcgctttcttatcaataggatagcctatcctttacgaaacaaccgattccgtaaacaaacctcccgttttccctcttcaaaaacgcaagatctaaacgatggtctagactagtcgttttggtatggcgaaggataattaaagagttgagagatatttaattaacactattattaatatttaaattagagattatgaacaagagaatttctactatgtttgcgtcgttcttgcttatggcaggtgtggcgtttgctgcggatggaactacttattctcagaaagaagctaagccaacagaaggcttgaaagtctatttgggaaatgaagagggtacatctttcttgaaatcagcgaaagtgacggacgctgcttataagtttgcgaataccgttacagaaagcgaagctggtgtcttcacggttacaggcgtaaagaccgagaatggtaaattgatgtttaaactggtagacgctgctggaaaggtggtttatggtaaggaaggaaccacgtttgttgaggccgctagcgaggatgatgtgaagaaaggttattgttggtttacttatgatgacaataataccgatgataactataatgatgataaaattacattaggaggtaaacctttggcttatgatatggctactgccgcaaatgtagcaaaaatgcttatcgctaaaaaaggaacaacctctagtgatttgaacagcaatctttccggtaaggggttctcttttaaattcccgaacgccgcttccgaggctgacgtgaatccgtttggagagcagatgttcgctatcgacgcttctactgttaattctacattggagttaggtgagactgaggtttccggcgagtgtttcgttgtagctaacgccgctggtttgaagttggctaaggagggtggtgtaaccgcagataacttgaaagccgctactttcatcgtattgaacccgaacgctactttcggtatcacgagcttggatgctgctaaaggtgagggtttcggtttcactaccgtaaagggcgagaaactgaacgctaccaatgttaagaaagacggtaagatcgctttcatgaacgctatctatggtgtttctgaagatgacttggcaaacaaggctggtcaatatacgatcaagatgacaggtgtgaaggtaacgaagggcacagatgagaactttggttcagagttaactgtttatgtaggagcttattccttgaccactggtggtttgaagacttatatcactacgaagggttccactgataagctttccttggcccagactacaggaaatacatgggcaaaggcttctgatctgttgaagactgacggtgccgctatctataatatctacttcacaggaactaaacctgccgatggtgaagaaggtgagtctttgtatggtaaatatttggtttctacgtatgcgaaaactgaagaggctcgtgctatcgcttctttctctaacgaggctttggctcctgctaaggttgacttgaaggctcctgttgcacaatgggtaattgtaagtatgcagggttccggtgctgttacgtttaagaatcttgagacgaatgaaacgtttaatgctaatttgtataagacagacaaggctggaatttatcaagccgtaaagacttcggttggtaatattcctgccgagaatatcaaattagttgccgtaagcgctaatgaaggcttcttgactctttctgacgctcaattgaagcaaaaggctcagttggtatttaatggcgagtcctctgttgccgtagagaaagtgtatatgagctgtaatgccgatgattctaaatttgagccggtaagtgatgccgctaagagctacgcttggagcttggagaaggcagaggctgttaaaaacaatgttgagtacatctatttgaaggatgacgaggtggctaagaagaaagcggatatgttgactattcaagcttactatttggttgacgataagaagggtttgaatcatgagggttctgattataagttggttgatcataacgataagaaagcggacaatctttctcgcttggtattcaagaagaacgttgacggcacttattccgtaatctgcttggatgaggctcttgacgctgacgaggctgccgataattatatagaagttgtcaaggctgacgctaaaatgttgaaagtggatgtgaatactcctagcttcgctgaagttcctgttggctcggaaaaggcggattatgcgaaagtagtggtagatttcttccagatgggtgctagcttggatgctgttccgagacatgcgacattggatagtgaggaaggttcaatctccttgaaggaaaacaagaatggtatccttgagggtatcattggtgcggagggtttgactttctggttggatacggcggatagcaaggcagagcttccttctttctatatctctaaaggtatcgctgaaggtgactccgttgctccggtaagaaatttcttgtatttcgctcaagactcattacgttattggaatgaggctcaagctaagtttacttatgacgagaactatggcttggaaggtacttatggagctgaagctaatcagaatacagatgttaaagccattttccgtccggctactttagcaggtgttgatacgatcaatacaactgtaaacggaaagaatgtggttgttgcggcagaagctaaggaagatgtttgccttggaggtataaataacttcaaattttatatcacgaagttggatgccggttattcggtgagaccggtagaccaacctacaaaatatttgtatgcgttgaacggtaagttaggctttacttctgatacttctaaagcgttgccggtaacagtaggtgagggtaatcctacatctaatgagtctatcgataactctgcgtcttcttctgtcgtagtgatcggcaacgccggttccgtaacgatccaaagcgctcaaggcgagactgcttatgttcgcaacttgttgggtatgccgttggcagagacagttgtcatttccgataacgctacgatcgctgttcctgctggaatcgttcttgtaacggttggcgacgagactgtaaaggtggtcgttaaataagacatgtaaaggaataatgaaaagataaatcgaaaatcattcccgtgcggattatccaagtaccccgagagggcgaacaagcgggaatggattaatattaatactaaagtaataaattaaagttcatccgtaagtacttccgtgaggatggaaacggatcaaaggcaaggggagacagtattgcgctgtttccccttatttgttgataagggtagataagggctttgttggtgaaatggacggtattcgatctttttgattgatataagggggatatcgtgacataccctttttgagagaggtatgaagtaggggagatcggaggggtataaatagcctttttcatgcaaaaggaccactttttacacacgataggtggtaaaaggcagtgcgactagtcgtgtttggcaacgacagtagtgccgttgggcatcgtaaacagtcatgaatagggttgttagtactcatgaatgggcatcgtaaccctgttatatccctgtcgtaactcaatgagatagcccggataagctataggatatgaattaggatgaattaaattcgctaggataaaaggctgtttttaactaatgccgtataagacaaatgattgctaatattttttctcgtatttggggataagctgtacgtttgcccgaaaaaagtgattctcgggcagttgagtttacaaattgacaaaatgccaaggtgcttttttttgtgagcttataggaagggctagatccgaaaacaaaccttgattttagagaatggcatgggataaattccatgcttgtacgtgctttattccttctttggaaggaagcggcaaatcatcgagcgagacaacgatcttctcgtaattatcctcaatggcctctaacgaggcatattcccgttcgatggtttctttgtcgattagtaaataagtggattgtagatagataaccctctctcctttgatagcgacgaaatccacctctttgttctttatgctgcctacgtatatttgatagccggcccttaataaatctagataaatgaggttttctagtttatacccaatgccgtagccaaagccttgatataaataattgttgaaacctaggtcattgatgtaatacttacaattcccggcgatggtctcctttcccttgatttggtatttctcgactttatgtaccaaaaaagtgtcctctatgtaactaatgtaggaggcgatcgtatcatagctggtcttccttcccgagctcttgaaataattggtgatattccgaattgatattaaattagatgcgttatttaccagatagacaaaaatgtcctcaagcaacttagcgtcttttatgttttgtctttgtatgatatcacgtagtaatacggtgtcttttaatgcggatatataatttctttgtacttctggttgagatagatggtataattcaggcataccactactttgcatatattctaggtagtgtaccttgttgttttctttttgggtgattccaagaaactctgtgtatgaaaaaggatagatggcaaattccacataacgtccggctaataacgtggcgagttctccagatagcattttagagttggagccactaatgaataactcatattcggcggtatagtcttgtgagtatgagttggcgaagcgttcccatccctctacattttggatttcgtcaatgaacagatagatacgaccttgaggatttatttgttttaagtagagattaaacagggaatcaagatcttcattggttttcaaaaaatagaaggcggatagctcacagttaatgaagaatatatttcggggatttactccactattggcgagatggctagctaactgacgaaggagatagcttttccctacacgtcgctgtcctaccaagactttgattaatctgtttccggtgtaggataatatcctatctaaataatcttgccgtttatagcctgttggaaaatcgtttccaccccataggttatacttctctaatgtcttaaatctatcgtccatactcgaaacttttgcgtaaaagtacaaaagtttcgaatgaactcgaaacttttcccgttaagaatgggatataccctcaaaaaaataacggcaaccgccttccgccgaaagccgagttgccgttcaaagttaggaataaggtttggtttgttcctttgtaatgattttaacattaatatgtaatgagagttttctacattttatcgatacaaaagtaaatgccgcttgttacgatttgattacgggagtgttacatttttagtaaaggtctcgccaaatcggttgataaccttgatctgtacgtctttgactccggctgaagggtggcaacggaataagtgcgatgtatgatatccggaaggttttccgtgcatgtcgatatagtcttggtcttcatcatcgaattgctccatgcgacctttctctatgccgttctcgctccatgtaacttggtaggtcgggtcccaatcccatacgttcaccactaggtaatccgcttgcgatttgaactcattcggcctataaaccctgaattgataatccgaatcatggccggttgccttataataccaagtagcggcattccctttcacctcaacgaccagataaccgttcggggcgccgcaccgatttacatggccggcccaccaagctccgcaagcggctccgatattatgctcgtacagattcggtgtgacttggttgttctcgaagaaatgcgtatgcccggcgaagatatggacattataagggccgacgatctctttcaggctctcagcgtcctcggcgtttcctccccctttatccgtctggttgaataccggggcatgtacgttgataaatacaagtgtcccgggtttaacgtaactcaggtcgtttttcagccattccagttgttcctttccgaagcgttcgtcatatttcttgtctttataataatcaatatcttttaaggtgatgatatgtgcatccccgacattgaacgaataattgtaagggccgaaatgatcctcgtagatacgctccgcatagctctcctcggttaccttttgattggataaggccgggtaacgtaagtcgtggtcgtgattgccgatcacggagaacatcgggatgcctaagaccgagaccgcttccttataaggagtgaataaatccatgcgatcccaagtaatgtctcccagcgccataccgtagacctcttttccttggtagcgctctatagtctgcttcaagtcggggatggtctcttcacggaaacgtttcatctgccgttcgtcgatggtctgaggatcggagattgccaagtagacaaacccgtcgattggctgtttcctaggggtgagcgtaaaatcatgttcattgatctccttacttttatcaagttgctgatagaaaagatccggtataccttttgtttgctcgatctcatagtcacccggtacggagaggtagacaaagcggcttttgtccagattcgaatctaggctatattctccccgctcatttgtttgcgtgaaattataaccatccgtaacgactacgccttgtagcggtttgcctgccgtatcggatacagtgcctcttacggtagcggcttgcgctatccaagtggataacgcaagtaaaagcgtgaatgataagaattgtttcttcatcgtaattttttttatgatttgaatatagaatatgttagttagaatttataacgtacgccgatttgaatctgccaagggtttccgttcatattggatacacccgtgtttttgtttacgttatatacgtattgcttcttctccgcgtcaaaactcttgatggagtagatattctgcttgcctagattatgtccggcaccccagtccttgttcagcatattcaggaaattgaaaaagtctatcgaggcctcgatggaatgagtcttatagatcttgaagttcttgttcaagcgcaaatcgaaagtaccgtagaagccatttacgccaccgttacgctcggcaaccttcccatagtttttacggatataatcttttacgctcttctccgcttccggattgtccaagatcgcttggataccctcacgaagatattgaggcgtattactatcgttcgggtcatagatataagccaagtcgttggatgatacgaaatcaccgttcatattaccactaaccgctaaagagtagcgggttccaccgatcccggagaaacgcaagcctacgctgattccccagaaagaaggagccgtaccgtagaatacgaccttatggcggaattggttgtccgagtaagtcatggtactcaaatcacgaggatcatcttttaccatcaaggctagagtcgctgtattcgctacgttaccgttgtaagaggtgttatccttggaatcgttccacgtatagctgaaagaaagctcgccatccttgaaataacgccaagttccatctacaacgaatgcgtattggttgatttttccatcgctgattaattccagcacacggcctaccttatcacttttacgtccttgcatccagtcggtagctccgttcttggtattgatactctcggcggggacgaacacgccacgattcccctcggcggcgatacggaagtaaggctcatccaccatattacggtctacgtacatataattatggcgtgcccagttggcgtaagcactgatacctacccgcaagcgatcggagaagaaatgcgtgtagctggcgttcaacttatatactaccggtacacgggcatccttactattcatattgatcgtgctgatcttttggatattcgggttgttgaataaatcaacgcccggagcggtagaaggatctttgcggtatgccgggaaattcggtgtcggaaccaaattgccttgtatatccacggacgctaccttcgtaccgtcgaacagcatattgttgatcatggaatagttgtttaaatccgaaccgaagataccggcgccaaggcggataatatcttgatgtttatcattcacgtcccacgtgaattgaacgcggggttgcaactggaaggtggagattacgttgtccgtacgtaagcctagttcgtcataaacagtctggttaaagttcgcgtggttgaaataacgggtataatccgcacggataccggccatgacctcgaatccggtgaaaagcttcgtttgtaattgtccgtagatagcggagttcaaggtattcatctttacggtaggatcatctaccaaggcgatttcccgggcatagcggtaaggagtcatatgctcgaaattatccagtcccgtgaaataaaaccgtccgttcatctcactaccgtagagtgatttcatattggtgtacatgaagtccgctccgaatgtatagttgatgcggtccgtattataatacatattgtctaccaattgaagtacattatccttaaaatgttcgggagcatagcgttgacctccaagttggatggaagtgtacatgctcttgtcaccagaaatagattccacgttctctacgattgctctcggaatattagaacttggcaattgcttgttcggggtcgtggcctcgtaaaccaagaaatgttgaagcttcaactcattagtcagtttcgggcttaataccgagcgtaaggtagcgagtaagctgttgttatgcgatttgcgatcgatccaaacctcgtaaagattgatgctggagttatcgctctcgctctgtttattatcctcgttgatgaaattattgcgaatggttaacaagttggtagcgttcaactgccagtcgatacgggcgaagactgcgttcgtctgcttcttcttgccgaactccccgaattgaggatcattggagactccgtatttagtacgggcgatatccagataacggtctagcgtagattgagtgacattatagcgagactcgtccgccgccgtcttgatatccgctatataaatcggacgggaatcctgttggtgatcccatacgacatagaagtgcgcacggtctttcacgatcgggcctcccaaagagaaaccatattgataggtagaaaagtcggaagtcgatttatttccccgtatatcataggagctggataaccaatcggcacgaccgaatccgaatacacttccggtgaaagtattggttcctgatttcgtgacagcgctcacggtaccgcccccggaacgtccgttggtcacgtcatattgattggttaccacctcaaattcgcggacggcttccatggatatcgtataagcgccggaagtcgttccgctcgctacggttcctttagccgtcataccgtcgatggtgtaattcgttgaggatgataattgcccggcgatatttcctccgctactcaatggcgagagatccattagggatgtgaagttacggccgtttaccggaagcttcgtgatattttgagcggagatagatgttgccgcaccgatcttcggaaccatgttcttcaaggaattagcgactacctcgacggcttggatctccaccgattcctccgctagcttgaaatccactcgaagcatatccccttggttcaatgcgtatcctgtctttttctgttccccataaccgatataagacgctgtaacggtataaggagaacctagcggaagctgcttgatggtgtattctcctttatcgttcgtgatagagcccgtgaagaatccggtagattcattcttgacttggatcgtggctccgatcactgattcccctttattatccacgaccgtaccggtgataatggcttgcgttccttgtgcgaataggagagccggtaagcaattaaaaaataacaaacaggcaagtaacctgcaagtaatgcgtttgttaaacatcctcatgataatctttttaaaattaaacctaaatatcttttacggcgcaaaagtaagtgtccggttttgcaaagagattacatccgtgtgtaggtttaaataaagaaaaaagcctaatgaaggatatccattaggctcaacgagaaaattataaatgtgtctataaaaaagaaggttagtcctcgtccaaagtcttgataatggtagatgctatcttggatgaactcttgcggctgctctttctgagtttatccgggttctcaagattcatgcaggtaaagaagttattccccctatatacctcatttttatctttgtcgaataaggtatagctgacgatatggaaaagcgtgcgcaagggttggtcttgccatttaagataatgctggtttaatactagcagataatcagcgtcagcattatccaataccttttgtaactcttcggtcggcacggctgaaagatcggaatagcaatcctcgctctccccgttaaccttgatctcattcagtacctgtccggtcacttgtgtagcgtttgccggaataaacttgcaatctccgttctttacggatgcggcgatattctcggcgatgatcgtattatacgtttggtcgatactatccgctttcataccggtctcttcggcgatcatcccattgtagaaatagtttgatttcacgttatcgtgcaaacctacgatgagaatttgctttgcatgataattgtcaccttctttcttacttatcaaaactaaatgattatcacaagtggcattaatcgtatgtcttaatctattaatagtcaagatatggctaagacaactttataatttcacttgtgataatatttccgttctatcttttcgagcaaagattgcttagaaaatcaagaagttcatcatccttttcccataatttaggttcggggttcttaattcctacgtcccgataagcattggctatggcttcatctttttgcttcctgctgacacgagcataaatttctgttgtttggacagaaacatgtccaagaaaatcacgtatatagatgggctgtacgccactctgtaacagatgcattgctctggaatgcctaaaaacatggggactaactttttcgggaatcagttggggattgtcaaaacgagccatatctgcgtatttttttatgatgtaagtaactcccggagtagatagttgtccaccttgtgcattgaaaaaaagaggatgtctctcttttcccggacgacacaacccagtttcatcaagataattctttaggagttccattattggctcatccaaaggaaccaaacgtttcttgtttccttttcctttaaccacaactgaatacggtttctcaaatctgatacatattggcgtgaggtctataagttcctgtactcttgttcctgaattataaagtagggacagcattgcaagatttcgtcttccggtgggcgttgatgtgtctatttgccgaaggattgcagccataccgtcaacagagaggtgcttgacgatttctgttgctcccctttttgcaggtatttgtctcacctcaatccactgacagatatgcaaggggtcgtccataataagaaaacaggcaaaggaacgcattgcggacaaacgttgattcctgctgctgatagagtttttcttttcttcctctatccagttgaggaaacttgatatgtgagaccttgtaaagttccgcagtgttatattttgcggtttgatatccaaggttttattatattcaagataagccttgaacgcttctccgtatgctcttaccgtttgctggcttgcaccacgttctttgatgaggtattgttgaaaaaatgcttcaagagacctcgtgaaatttttatatgtatccattttctttatactttttgttttgataaaaaaagattcactatctcagttattggcatagttgtctttgcgtccatagccaatagttcgggaaaagctgtcggtgtcaaacgtaagtaatattccgtgtctttagggtcacaatgtcccatatatacagcaagttgcggcatacagcagtagatgtctttacctgccgctatcatctttttcatggtatgcacacatgcggtatgccgcaggtcatggattcttggcagatatccacttggcgtaaccttgaatcccgaagcgattagaatattatggaatctgactctgacggcttttgcatttaccttaccaccaatattgttgcaaaacaacaaagcatgtggagcatcgactccagccactggtaacatgttcctgtatcttatatattcttttatgacaatctccattgttggagttattgcacagtagcgttcatggttgttctttgtttttctcaaacagatggaatgccttgtgaagtccacatcaatattggtaatgcttaaagcctcgccaatcctcatgcctgtactgtatattaaccttaacaatgtcggcatgacaagggctatagaaccgggattgatactatagtctcgccatttgtccaccgttgagaatagtgtggctatttcctcttcactataaatataaggtgtaaagtcgcttttgtaaggtggatgcatacctacaaaacttattttacctctcagattcaaatactttgcaaacagtattacaccacgtatgtacaaggatttgtgtgcttcattaccctcaagactgtcaatccaattatgataatgttcacgtgaaatatgttcacagctatatccaacactcgcagaatagcattcaaaattacttagtatggtttttgcttctcccgtacaaattccctttatttcacgttcatggatatagtcctgcatatagggatagagcgaggagtgagatttcaacttaacttcaaacatagaatgcacctcctttctgtgtataataggacttatctaccggaggtacttcgtgtgaacattccataagagagtcaatgtccacgttaaggtatgccattgtagctcctgtacccgaatgccccaatgtttcggaaatagcctgtatgctacttccggttttcatcattgatgtggcaaggctatggcgtagcgtatgtgtaccgacatgtctgcctattgtttcaatccccgccctgtgaatggctttgctcaccgcaccggaaagtgtggctgtggctatcggtctgtacggctctacttggctaaggaacaccatattgcttttcgttttaggacgggcatgtttaagataatcaataatggcattaccaacatccgccaacaacggtagctccaaatcttttcctgtcttgctttggaggattttgattctattgttcttccaatcaaggctatctaattggagctggcatatatccgatgctcttaaccctaaacgtgaagccaaaagaatcatcgcataatttcttttaccgagcaaagtacccctgtcaaaagacatttctattttctttacttcttccgctgtgtaatatgatggtaacggctttggtattggaggctttttcccatatgttacatgagccaagaccaaaggaatgacatcttgctctgccaaataattcaggaattggtttatgagatagaaataccagttgtcggctgttctatgcgaagcaatcaaatcaattatcaaggttcgggttaagtgcgagggagaatcgcagcctttttcggataagccatttacgatatttgacattgaatgctgatagcgtaataatgtaacattcttacgtttctttgtttttatgtgttcaataaacttgtttgcataatcccccaattcattggacgggaaattgtatgtcttgagtttttttcgctgtgcggcatacggcaaaccttgaatgaacctgtctataagacttaacgcacaagaatactcccttgattttcgctgatttggagaattatcagcttttgctatcttttcttgaaaagcagaactgaaattcaaatcgtaagaatcaacacccatatcctccatgtattgggatatgtattctatgtaacgtaaatacctgtcggtcatgtaggtggacagtttgaaactctcaaaggctcttttgcagtaaatgaagaactcactgcgtggaatggatttgcaattattcattgtgtatgattttttaagttcggcgatattgccatataatcaaaatgaacaatatacaataatattattaaaagtctgattgattttcagataaataaaatgtgttcttgtaataatcatttagttttgataagtagcattataaaaagattgtgataatgctactttctttagcgttcgctgctatagaagctacggctaaaaagaacataaccgtaaagattctgattttaaataacctttccatgattcttctattaaattctgtgtctattaatttcggaggcaaagatattagcggggtgttgcagggatattacggttgtataaagtaatagttaccgataatcccccctgtaccggcttggatattaaaatcgtggattcgttgtaaagtctattctaccgtgtggatgagttcaatcaaaaggcggttaccaagaaactttaaggagatatagaaacaagggttgtttttaaggttcaaagaacgctaaaaacaacccctgttatttttacttattattctcgatccacttgcgagcgttcacgaacgcctcgatccatggagtgacctcgtcgttctccttacggtcggcggggtaataaccgcactgccaagggaagatcgcacgttcggggtgaggcatcatggctaaatggcggccgtcctttgagcaaacaccggcaacggaccaaggagaaccgttcgggttggcgggatagccatcgtagttgtatttagcgatgatgttgtactccttctcctcgtaggggaactcgaacttaccttcaccatgagctacccatacacccaacttcgtgccgctcaaggagccgaacattacggagttgtttttcgggatctccaagctaacgaagttagactcgaacttatgggaatcattgtgaaccatcttatgctttttctcgtgctccggataaaccaagcctaactcggccatcaactggcaaccgttacagatacccatgctcaacgtatctttacgtgcgtaatagttgtcgatcgctttcttggctttctcgttatacaagaaaccgccggcccagcccttggcggaacctaatacgtcggagttggagaaaccaccgcagaatacgatgaagtttacatcctccaaagtctcacgtccgctagccaagtccgtcatatggacatccttcacgtcgaaaccagccagatacaaggcgtaagctgtctcacgctcgcattgcgtacccttctcacggattaccgcagccttgatgccgttcggagcgcggcgttcggctgagagtccgtaagaagaaagctttccggtaaagtccttgtggaacttgtactgtacgggctgcatcttatagttctcgaaacggtttccggcacaaacgcttccgctctgctttacatccagtttataagaagattcgtaccatacgtcacgcatatagtcgatgccgaagtgatattggatgccgtctttcgataccaatacatggcgctcgtcggtcggtttggcgatgatggcgaaacctacgccagcttcttccatcaacttttcgaatgccttcttgtcctttacctgaaccaagatacccggattctcggcaaacaggatcttcacgatatcgctctcggagatcttatccaagttgacatccaaaccaccctctacgttggcgaagcacatctctaacagggcggtgatcatacctcccgctgagatatcgtgtccggcaaggatgagtctcttctcgatcgcatcttgtacggcgttgaaagcgtcacggaagtattccggatctttcacggtcggaacctcattacccagcttgttcaaagcttgagcgaaagcggaaccacccaacttcaaggtatcgaaagagaagtctatataataaatgtatgtattcttgtcttgagctactaccggggagacgattttcttgatatcgctaacctctgcacctgcggagataatcaccgtacccggggcgatcaccttatcgtcgccatatttctgcgtcatggataaggagtccttaccggtcgggatattaatacctaagctgcaagcgaagtcggaagcggcttgtacggctgtgtacagacgggcatcctcaccttcgttacggcacggccacatccagttggcacttaaggatacgctctccaacttatctgtcagcggagcgaatacgatattggtcaatgactcggcaattgccataacggaaccggcggccggatcaaccatggctacctggggagcgtgaccgatagaagttgcgataccagctttcccgcggtaatccaacgctacggcacctaagtcgctcaacggcaattgtaattcaccttgacattgctggcgggcgatcttaccggttacggaacggtctactttgtttgttaaccaatccttgcaggctacggcctccaattgaagtacgttctccaaataatggtgaagttcggattctttgtaaacaaccggttgataagattcagtgaccgtatggtctgtcataaccgttctaggcggtttaccgaacatatattccagcttgatatcgataggttttacgccgtccgcttgttcgaagacaaacttcatgtcgttagtagtctcgcctaccacatacatcggggcacgttcacgatctgcgatacgttttacacgggctacatcttcttctttcatcaataagcccatgcgctcttggctctcgtttcctacgatctccttcgctgagagagtcgggtcaccaatcggcaatttgctcatatcgatgtgtccgccggtagcctccaccaactcagacaagcagttgaggtgtccacccgcaccatggtcatggatagagacgatcgggttctcgtcagactcggcgatcgcacggatcacgttagccgcacgtttctgcatttccgggttggcacgctgtacggcgttcaactcgataccgcttgtatattgccccgtgtttacggaagagacggctccaccacccataccgatacggtagttatcgccaccgatcacgaccactttctcgcccggttccggatcgcccttcaaggcatcgcgcatatttgcgaaacctacaccgccggcaagcatgattactttgtcgtaagcgtatttcttatcgttctccgtgtgctcgaaagtcaataaagaaccacagataagcggctggccaaatttattaccgaaatcggaagcgccattggaagccttgatcaagatctgctccggagtctggtataaccaaggacgagggtctaggactttctcccattcgcgagcgccttccgtacgagggtaagaggtcatatagaccgctgttcccgctatcggcaaggatgccttaccaccgcccagacggtcacgaatctcaccacctgttccggtagcggcaccgttgaacggctcaacggttgtcgggaagttatgcgtctcggctttcaaggagataaccgtcttgatatcttttacggcgaagaaatcgggtttgtcaccggataggggagcgaattgctctaccgtcggtccttcattgaacgctacgttatctttataagcggaaaccaatttattagggttctcggcggaagttttcttgatcaagttgaacaaggaactttctttttcctcgccgtcgatgatgaatacacctccgaatattttatgtcggcagtgttccgagtttacttgggagaaaccgaacacctcgctatcggtcaacttacgtcccaacttctggcttacctcgttcaagtaagcgatctcctcttggcttagagccaagccctcttgttggttgtacacttccaaatcctcaatgtagacaataggatccggttttttactgatcgtgaagatctcctgattcaagccattgtagatacgttgcaacatcggatcgtgatccgcatcgccagaagaaacaggaaaatattcctcaatacgggaaataccggtcaggcccatgttctgggtaatttcaacggcgttcgtactccacggggtaatcatttcccggcgtggccctacgtaccagccttccaatgtttctgattgaacaggagtcgcctcgctaaacaaccaaaccagtttttgagtgtcttcaggagagaaagcgtgcgcggcctctacagccagcaccgtctttgttgaagattgaaagaatagaatcatatcgttgatttattagtatttatcacgaaataacgaataagcctcttttagagagtgcaaagataatgatttcccgtgaattattatgtcaatacgttttaaaagaaaagagggcggaacctcccggtctcgccctctcatgtcccctgcatagtaaaaaataagagtgtgtctatattctaccagcctgcgttctgttgtgcggctagcgtggggtttcttaatatatcattcaatggaatcggccaaataaagcgtttatccgtgtacgggatgaactgtttgctgttgccgaaccattcagctttcacttctccaccaacaacgaatgcgccttggttcttcacattgttgtattcgatctttgcgggaataccaccggacggcagtaaatcgtcagccgctaaacgatgaatatcttcccaacggcgaccttcaccttggaactcaatgcgacgttcccaaaggatagcttctaccagcgctttcgtgttggcgaaatcgccagccttatacgtttgtgtagcggggtcggccaaagaacggtctcttacttgattcaatttctccaatgcgagagtcttgtctcccgcacgcgcggcagcctcggcctcgtttagcaatacctcggcatagcgcaggatcggggcatactcttcacgtgtttgaggattctggtatttatcacagaagtaataatcgtcagacgcacgataaaggacgaggttacgacgcttgtcatcccctttccagaatttggagttgtaaagggtaggggatgtcgggcacatcgcacggccaccttcacgggcagacatcatagcggacatagctccatttacagatgcgttatcttgagagtcattcggaatggagaatatagattcctgattgtctttgtaagaaacgaaaggagtggcaggattggtttccagaatgaaacgtccgccttccagtttcttagcttcagtaactacattgttccaatcacgcatatgtaaatatacgcgcgttttcaatgcgatggcggcacctttgctcgcacgtccgatcttatcagcatcaataatgtccggaagcatgctttccgcattattcaggtcgcttaatatctgatcgtaagtctccttaacggtagaacggcctatgctttgttgctcagcgagttggctggggtcgtttacggctttcgtgtaaataggcataccgtagttattgttaccttctacgttgtagggcagggcataatggatcatcaagttgtgataggttaacgcacgtaagaacaggcattctcctttgtactgattccctttctcttcggttatgacacccgccgctaccgcgccttctatacctgcgtataccgtattatagcggttaatagcctcgaaagaggtttcccacatcgccacgttattagcggtagtcaagttataggttgcggaataggtataatcatagaattgggcggttaggttcatatcttcaccgcgcatttcgccttgcaatatactggccgctccaaaaggatagccgcgtgcccagccataatcatccggatttatatacataccacattgtgcggcatcataagctccgactacggctaactcgcaacgttcttctgtcccgtatgccgtaagctcagagaatttgtcaacaggttcaaggtctacgacgtcgctttcgcaggcggtgaacacgggtagcgagaacagggctgtccctaacgctactactgaaatgtttttatataatttcttgtataacataattgtaacttttcttagtttgtgaaattagaatgtaatgttcgctccaaaagtgaatgaacgttgctgtggcataccgttccaatctacacctaaacgagagtttgtctcaggatccaatccggaataacctgtgatagtgagtaagttctgtccttgaacatagaaacgaatctttgtcatgttcagtttggatacgaccgccttcggtagtgtatagcctaaagctaacgtcgatagttttaggtaattgccgctctcaacgaagtgtgaatccgtatatccatcattgaataaggaagaggcgtctccataaccgatttttggagtcatgccgtcacccggttgctctggagaaatccagcggcctaagatttctgttccattgttggagaaatccatattgaacaatgcgctttgacgagaagcgttcatgatcttattacctccggagaagcggaagaatacatttaaatcgaaattcttgtaagaaactgtattattccaacctccgtaccaagtaggcatagatgaacctaataccttacggtcgctagcgtccaaggaagaagccttggagacatccgaagggttggaaggatcatattccgcatagtcgtaagagccgaatgtgtcgaattgcactaatgaaccgtccgccttactccagatcggattaccgtttgcggcgtttacgccgtaataatcatatccatataaagatctatatgactctccttcacgaatgattgtgtaattgtctacgatgtctgttccgccgtataagctcttcaccgtgttcttagctgtggagaagttgaaattagtttgccagttccaatctttggtagcgatgattgtagcgttaactgtcaattccataccggagttcttgatcttaccgatattatcaaaatatgagttgtaaggaataccagcggtaggtgctgtaggaacttccaacaccaagtctttggagttcttttgccaataagctagctcgaatgtcaggcggttattaaagaaagagccatccaatccgatatcgaaagtctcggttgtttcccatttaagctggctgttacccatacggttccaagcgatagctgtattcgatcctgctttcttcgccccgtaagttcccagataagggaaataattccctaggtcagagtttccgattgtagcgtagctggcacggatacgtaagtcgttaaaccaatcattaatagttgattcgctccagaatttttcgcgagagatacgccaagcggctgatcctccccagaatgtaccccagcgggtgtctttcggaaggctggataagccgtctgtgcggacggaggctccgatataatatttactatcatagttgtaattcgcacggaacatataggaggctaatcccataaacgttttacctccagatacgaatctctcaccaaatgtgttggaaatgatatggtcggtgaagaaagcatcggatatttgttgcacggttgcgtccgtatattcatattcttgatgggtgtactcttgtaccgctgtcgccgtcagattatgtacatcattgaatgtacggttaaagttgattacgttttgccagttccagttcgtgtatgtggtattgatttcttccaataagccgccatagccgtatccgtctcctgattccgggttccataccatgaaatctttaacattcgagatgtctaagccagcttgtgtctttaaagtcaatccgtccatgaatgtgatttcagcccatccaccacctaatacacgggtattggtcgtacggtttacgttattgtctaatgcccagacgatattctggataccattatcaatataggaaaggttgcttccgcgacctaatgtcttacggttttcagcgtcgatattgtaaccagtaggatcatccggattgaatacagatacgtttggaagcatacgagtgccggcgaaacctacgccacccaatgaattctcgtcattcatgacaccattaacccgggtacgggtcatctggccatttaatccgatgcgtaaccattttgtcgcttgttgtgtcaaatctgcctttaagctcaaacggtttaagtcattggcgcgaatgataccttcttgttccgtgaaacctaatgatacataatattggcttttatccgtaccaccactggcggataagctatgattgtgctggaaacctgtacggaaaatataatcattccagtttgtgtccggtccgttcggatcgtaaacagcctgtcctttcattccccagttctcgtatttctcgttagcgatagtcacgaaatctttcgctcccagaagatcatgcaatttagctgcgctggctgcgcttacatagccatcgtaagttacttgagtacgtcccttggagcctttcttagttgtgatcaatacaactccatttgccgcacgggagccatagatagctgtagccgcaccgtctttcaatatttcaatggattcgatgtcattcgggttaatatcagacatcgcattgtaagaagcgtaagccattcctaagccggtttttccatcggcgttatcaccggtggcgatcggcatgccatctacgatgaataacggctgagagttagaactgatcgtactcataccacggatcttgaattgaggaccgcttcccaatacgccactaggagtcgtaacctgtacaccagcggcacgtccagctaattgagagtcgaaagacgctgttgccaagttgcttaagtcttcacctcctactttagatatggcactcgtcacatccttttttctttgagttccgtaaccgacaaccacgacttcatccaagttctgagagtcggactccatcgtgactttaatgattggttttactgccacttccacagatttcataccgatgtaggaaacgattagctttttcgcgttagaaggaacatccaaggtgaacgctccgttgtaatccgttacagtaccggtagtagtaccagctactacgatagaggctccaatgataggtccatcgtcttccgccgagataaccgtaccggtcaccttcgtggtctgagccgttgcgaacgctatacttgcgaacaagcatagtaatagataagtcaaccttttcatagacacatactttttgtttaatttgttaataaatagatcgttgtaatcaattgttgcacttagtcgattgacttagtttccgaagaacttcatgagggtaaggtactttggtgttacttcctagcattgatgcgggattgagttaaaaataatttgcatattaatactatatattaatactagaatgtattaaattaacatataacttaaaataatccgtattgacaaagttccgtgtaagtttatttttattgtcaatatgtttgtttattgcaaatatatctttatatttgccgtacagccattaaaataaaatgcttgctgtaaatagtacaattagacataacagatgtttacataggttgcatgttctataatttattaagatatttataataattaataaatattgaacggaaaagtgatttagttcttcggagactaaggtgtttcataaatactatctaatgtatttaaataaaaaaagagtatctaataaagatactctttagatatatgtgaatagagtgacctattttgatttttataggcttttcggaggatataatgcgtcccaccactccggttgatctttcaaccacttagcgaaccatgcgtaaattgtgttattccacaagatacgtttctcataatccagtatatggtggttctctccttctacctggacaaacgctgtaggcttacccaataattttaatgcggtaaacatctggatgctctctccaatcggaacattcgtgtctgcggttccatgtaagaacaagatcggggtattgatcttgtctgcgttaaacagcggactttgtaaagtgtacatatcccgggcattccatggataactgttagcgctagccaacgagctgtatgaatatccccagtaaccttctccccaatagctggtgatgtcgctgattcccgcatgagacatggccgccgcgaatatatctgtttttgtttgtaggtattgagtcatgaaacctccgtatgaagcccccatgcaaccgattttcttcgtgttgacaaaaggatgctcctcacagaactttttcgtgccttcgatgatctcgtcagcggtaagtttaccccatgcgttgacatggcgtgcggagaactcttggccgaatccagtcgctccactgggctgtatgatgtagacgatgtaccctaagccggcgtatacatgcgaaggataacggctttccatcacccgggccgtaggagttgttcctccgtaataattcacgatcatcggatatttcttggtcgcatcaaaatgaggagggagatagaagcggccgtaaatcgtatccccttgggcggaaacgaaattccaatcttgcacttctcctaaagtgacgtctctcaagatctctttggagagatcgatcaagcaggaagaggcgtcgtttttcaggttataggtataaagcctttgggaattggaagcgcttaatccgaaataaaccatttcgaaagcttgattggcgatggagtaatcggagatgacatcttccttggcttgaagttgcttaatctttccgttggacgggtttagactatacatgcgaacacggtccttatctttcgccgtgatatagatttgtttatcgagggcgttccactcgtaggaatcgacagaggggtcaaaatctttcgtaagcggctttatacttttatctgctatattgtataggaataattgcccgtcgctcgtattcgatgtctgtccttctttgatctttaatccgataccatcgaaagcctctccagacgcgtcaacgagtaattgggtggcatccggggagaaaacggcacggcttacgaatttctcaccttttataatggtatccacatgcatggttcgtagatccatcttatatatatatgtacgtgagaaagggcgctccgttaaattcggttccctgcgactgaatagcagatagtggccgtcttgagatacatcgttgatgtaagtagaagtatgtccataggtgagccgttggaacaatccggttcgcaggtcatatttatggataaacatacggtttctccatcccggttggcgatcatccggcaccagtatctcttggatctcttttcgttcttgcggtcctttctcccgtatggagaataatagatagtcttcggtaggcccgaagctgaaagaaccttcaggcaattggctggaaaggatgttctcctttttactggtagggtctaaggtcaccaattccgtgcctttcatccctttccgggtgtaataggccagattgcttttaggcatccagcgtaagctctgtccgttctcaactaatacggaaccggtagccttgtctagtatctgggtaaatgaggactgctttccgccgggataggtttcttgataggagacgataatgaattttccattcggggacaggctggcggattggatgcgtttaccatcaaatacatcacttaatgtataacgtttctccggattgacggtcgcggttaccaccgcgtctttttccgggttgaatgaggcttttaaggcattctctttgtggctctcagataaatatttaattacgatttcatagcgtcgcggctccaaggtcaacgaggcttctccttgggttagttttgtgagttgtccatccacgtagacttctgaaatctcagggccattgatccttaaggtgccttttgtatagcggtcactattcaggtagaaggaaaccaaatgtagcgcgtaggaagaggccgaggttggcaaggtcagctctccggaagacgccgcgtcaagggtttgtccgctttgggaaaggttgcagaaaggaacggtcgtgttcaatagttccttgtcagagaatctcttactgtttacatccaagctatctgctaggaaaggctttttcacctcgtaagggccggcgtaattataatgtcgcacgacaacctcatccgcccatagtgagcaacaggagcatagggctgaaagaattaagatgtttttgtttatcatgatatttgttatttagtataagataagaaagcgagatggcaggtatctctcagccatctcgctgtatcattatcttataagatttctatctcatctacgaacaagaatgcgggacttccggcgccaccgtgccattttggtagtttgctgctgttgatgataacctcaacatagcgggcctttaccggggcgaaggatatctcttggggatataatccgtccttgtcgttttggggcagctccgggattttcttggaagctacttccttgaaattcttgccatcatcggatacctttacggttacggcggaggctcccatgatccagtcacctttcaccacattcgtattgaaagataccttttggatttcggttggttcctttagatcgatcgtggcgtcaaggtcttttccttggaaacccagccaatggccggtcttgtaattactacctccacgtaagccgtctaccaatacctgtgccccgttgaaaacgtatcctttgctgggttgctctttcaaggtgatgggcttcatcgtcgctttattgaagaagatatcttctgagaagatgcggctcgtaccgttcggacggacaacgatcgccttgaattcgcaatcttggttgatctgtaccgggccttcatacttgatgctggcgatcgtaggatcgctaccgtctaccgtataatagatatctccttcacccaacttcgtcaaggctatgtcgagtgttccgttctccgtattggtggtcagggaggcgttaatatcgaagatatgctttccgtaattatatcccaagcgatcgtaaagttgtgtcatgcgggccacacggggcaggaacgtctgataatctttcttggacggatcgctccactggatatcggctacggcgtcgatacggggcatgatcatgtattctacctgtgagaaggtcgggatatattccgtccagaggttggcttgcgccccgatcacgtacttctggtcttcaggagagataccggctgtcggctcaaaagaatatactttctctaacggcaagtaaccaccgatagcttcgggctcaagatccgtatccgctgattgatagtaatccagatatacatatgtattcggtgtcatgaccacgttatgcttttgcttggcggcctcgatacctccatccatgcctctccagctcattaccgtggcattcggggccaagcctccttctaggatctcgtcccagccgatgatatggcgtcctttgctctccacgaatttctccatgcgggagatcacgtagctttgcaaatattcctcggcggaatgcttcttatctcccttgataccttccgccttgatgcgagcttggcatttcgggcatttctcccaacgtaccttcgggcactcatcaccacctacatggatatattcggacgggaaaagatcgatgacctcgctcaatacgtcttctaggaattgcatggatttctcgtttccggcgcagatcacgtcgtcggctactccccattgaccccatacgtcataagggcccccggtgcatcccagttccgggtaagtagccaaggctgccaattgatgtcccggcatatcgatttccgggatgatcgtgatatggcgttcagcggcatagttgatgacatcgcgaatctggtcttgtgtatagaagcccccgtattcttttccgtcatatgttccggagttatggccgatcacggtttccttacgtttagatccgatctgtgtcaattccggatatttcttgatctcgatacgccaaccttggtcatcggacagatgccagtggaacgtattttggttgtgcaaagcaaggatatcgagatacgtttttaccgaatccaccgggaagaaatggcggctgacatccagcatcatgcctctataggcaaaacggggatagtcgttgatggtagctgccggtaattctacgttcatcccttgggccgtggccgggatcgatttacgtaatgtctggataccataaaatacgccggcatccgtgcttccggcgatccgtatcccgttatcgctaacggtcagttgatatccttccggattctggatgctttggtcgataacgaggctgatccccttaccgggctggccggtagcggttgctaattcatagcccgtgatttccttgatataagaagcgaggaactcggcgttcttcttcatcttatcattgccctccggataaaatatcttcgtggatggacttaggacgaaaggatttccgttcgtcaatgttacttcttgtggcaaaggcactactccgtaatctccttttacggccttaccaccggagcaagcgatcattcccgtgcaaaatgtcaggacgagcgctagtttgcttaggctgttcatgtgtttagagtttagaacgtaaaacaataattgattcagtatcaccgcccaaagataaaaagaattagccgttttatctaatgcttttacacttttgatgcgataaccttagggactttgtctatatatagagactatttatcaactggtgcatgatcgtccaccagttgttgcatgatcatccaacagttggtggacgatcatgcaacggctgttggatgatgaatacttctataagaaatgtctaaggaatatggaagaaacacctaaggtctaaagggaaaagggccagggactaagggaaaagaaacgtcttcttgagaggtatttccttgtccttcttataatatgtattcacacgttttacggttgtgcagcggatgtaagcgtcatggcagtagatgagcgcttgccttttttcggcggcttcggcaagcatgcgcagtttctcgttgtatgacgtgaccggatacgtgtcgtaagcggagatccattccggggatacgctggctacaagggggataacatctccggcaaagacaaaagtccgatcttccgtatggatatagggaacaatttgccccggagtgtgcccatcatacaagcgtagctctatcgtggggcaaatcgaagtgtcggcatctagcagccgtaaggaattagcatccgcgacggcttgcatattctcgataaaataggaatctttctccaaggcgttcggatgaaggaaattctcccattgcttgcggctaacccagtggttcgcatttgggaatgagagaaataaatgtccggtagattcatccttttgcgtggtataaccgcaatgatcgaaatggagatgggtgaggacaacatccgtgatttcctccggttgaattccccggtttcgtagttccgtgccgaggtctaccaagttgaagaagcggtaataacttagttgttttaagtgtttatttcccgctccgttatctactaggacgatgcgtccgtcatctgtttttatgacaaggctacgcatggctagcacgcaaccatttgtctcgtcgctcggatagcgacggctccaagcgcttttaggaatggccccgaacatggcgcctccgtcggcgtagaagtagccggtatcgatgatttgtagtttcatggtttctgcattctttctttgggggagtaaaggtatggtttttatcatactcaatagtataataaatgtaaaaatgactggtttaaacgttggtttagactagtcattttgatggatgggatagtgcatttgacacaattttaatattggatgtaatgtattgattataagtcttattactaatagaatcgaaaaatgatttaaatgaatgttgcttaatttaaattaatggttaacttcgcggacgactagtctaaacgaacgttttagctagtcatttttattagggactgcgctcagagatagcagaaagtaggtttttggtgtttgaatattgttaatctcaattaattataaccatttaataataaagatggaaaaatgtagtaagaagagcaagcaattgtgtttaagcttgttcaaaccaagtgttatgatgcttaccacgggattcctatgtatggcctcctttcaaggattggcggctgtggaaccctcgcacaactacggaccgaatgttgaatcggtcatgcaaaatggtaagactgttacggttaaggtttcagattcaatgggtgagttgatcggcgcgaacgtgttggtcaagggaactactatcggtaacgtaaccgacatgaacggctcggttacgttgcaagatgtgcccgcaaacgctgttttggaaatctcttatatcggttacacgaccaaggaagtcccggttggcagtcaaagtgttataaatgttacgttgtcggaagattcccaggctcttgaagaggtcgtggtcgtaggttacggtacgatggagaagaagcaagtgaccagctccgttacctcattgtctgccggcgatatgatgaagggtgtgggtggtgccgatatcaccagctctttgcaaggtaagatcagcggtttgatcttgcaaaataatggtagtgccaatggtacgaccacgatccagttgcgtggtttgacctctatcaactctggtaaggctccattgatcgttgtcgatggtttcccgggaggtgatattcgtgccttgaaccaagacgatatcaaatctatcgatgtgctgaaagatgcttccgctggtgcgatctatggtacacgtgctgcttcgggtgtgatcttgatcacaacgaagagtggttctaacacgaatggtaaagtaaaattgaattatagtactgagctttcgaagaaacaaaactatggccgtccagatatgatgaccgccgatgagtatcgtaatcgtacggacgtgaatatcattgattacgggcagaacgctgattggtgggacgctcttttgcagaaggataacttctcgcaaaaacatcacctctctttggagctaggtaccgagaacgcacaagtgtacacctctttcttctatgagaccaacgaaggcatcacgattaaggataaccgtaaggactatggtggacgcttgaatgcaaactttaagctgttcgatggttggttagagatccgtccgatcgtggattatcgtcagactgctcgtacttccgatggatcggatgaggataagaaggcaaacttcaagcaggcgttgtataataacccgactcgttccccatttgacccggaaagcccgagcggatataacgtatggaccggagaaactttggactacaatatcgtagcggatcgtatgctttccgactacgagggcttggataaatggtttaagcctgaggtgacgatgaaattgaacatcaagccgattgaaggtttgagctattctcagacattgggttacgagaaccgtcagtgggagttgcaccagttccgttctcgctatcaccgagaggaggtgacaaacaaccgcggtggttgggcgaaattggaattctcgaagaccgaacatcttacttctgagggttacttcacttacctgaaagaatttaagggaggtcatagcttaaatgccgttgccggttactcttatttcgagaagaatggagagaatttcaatgcggagaactatgatttcggtgtagaaggcctgaagtattgggacttggaatccggatcttatttgaccgacggtaaggcaaagatgggatctaaaaaagatattacggaacgtttgttcgctctttatgcccgtgccaattattcatataatgataaatatatggtaacggctacgatccgccatgagggttcctcgaagtttgccgcagagaaccgttggggtaatttctgggcgttgtctggaggttggcgtgtatctggtgaggaattcatgaaagagtttgattgggtaaatgacttgaagatccgtttcggttatggtgtgaccggtaataacgacttcgatgcttcctatatggctaatacgttaagtcgcgaccaatattggatgcttccgagtggtagctgggcgtttgtttatggaccgagctctaacgtgaacccttatttgggatgggaagagaagaaagagtggaatatcggtgtggattactcattctttggcaaccgtatgtatggtaagttcgattactatcgtcgtaaaatcgatggcatgatctacgaggtgaatgttccacagccaccgtatccaaatggcaaacaatggcagaacattggcgagatggagagtaaaggatgggagttcgaggttggtggtgacatcatccagaataaggacttcacttggacttccagcttgaatatgagccataactcaggtaagatccttacgatgtatggtaacaattcacgtatggatggtaacgctatggatgaaccgggatggccgggcgatgcctctcgtattgaagagggggcagagatcggtgcgttccatatgtggaaattcgctggattcgacgataaaggagacttccttttgtacaataaggatggtgaggttatacctgcttcccaaaagagtgtagacgacaaacaatatatcggtaattatctacctaaggtgatgatgggatggaacaatacctttacctataagaattttgacttgggtattaatatgcgtagttggataggtttcgatgtcttgaatacttatccgatgtacttgggtatccagggacagagtggtgccggccagtggaatctttggaaaccggcgcttgacgatccgaagtataaggacattcgcggcgtgaagcagctttgtgactacttcttggaggatggctcgttcttgaaaattgatgcgattacgttaggttatacattggcgttgagtaagtatacaaaatgggcagagcgcctgcgtgtatatggaactgtcggcaatgtagcgactattacaggatatagcggacataatccggaagtgaatattaccggttgggaaggcggtgtcgataaggtttggaactgtgatccgatagttcgcacctatacgttaggtattcaagtaacattctaaaaaggtaagaagaaaatgaaaattagcaagataacaaattggttggtagccggagctgcttgcttgctgctgggtacctcttgtgacgtggatcctacgttctattcgcaggttgttcccgacacgtattatacgaatgcagacgcggtttggtcgcgttttaatcgtccttttacgcattggcgttggtgggtagctcataacgacgctcgtgtgcgcttgatggaagtgggaactgatgctatgtgtgtgcctactcgtggtaatgactggtttgatggcgccgtttatcagaacatgcatcatcatcattttatggatgatatgagcccgatgaaggatggatgggacttgacgacgatgggtgtggctcagtcgtggagtgccttggaggatttggagaatattgatttcgtatcggtgggtttgactgaggaggatcgtgtatcaatgattaatcagttgaacgtattggctgcctctttttatttggatggtttggacatgtttggtggtatgcctctttacacatctacgaaggaggatgtgaaggctcgtgctacagatgtggagactttccattttatcgactccttgttggatgtatctatgccgaatcttccgttgaaggagaccttgggagcacccgagacgaacgttatccatcgtgctgtggctgcggctttgaaggttcgtttgtatttcaacgctgaatcgtatatcaataaaccgatgtatgaggaggccgctaagatttgtcaggatattatcgatggaaagtatggtcagtataaattggccaaccatttcaccgagatctttggttggggtaatgagacttgcccggagattatctggacagtaccttccgagaatgccaaaggtgagacggatggtggtttgactgccttcactcttccctataatttcaaggatttcttagggggcttgcaggatgctagtggtaataatgggctttgcctatgccctagtcgcgatccggagggtaacttgtataagtttaacgtaggtaatccatacgagacattcaacgacaaggatatccgtaagcagcagtatgtatatgagggtggtcgcaaataccgtggtatgtttatcgttggtgagttgcaaaacccggatttccccgagtataaatgtctgggtgcccgcgagtatgccggcaaggtcttgaatgtcgtagaccagatcgctcatatcagccaggtgggcaatacggtagccagtcttaaggatctgacttctacgattgccgatgcagaggagaactcaggcgtgcgtgttcttaaatttagtcctctgcctaatcaagatgagttcaaggaacgtttcaacccagattgtcctgtaattcgtctgacagagatctattatactttggcggaatgtaagatgcgtttgggcgataagaatggtgcggccgatatcatcaactccatccgtaagcgtaacttcgagggtggaaacgacccggatcctgttaccgctgccaatttggataaataccgtatgctgaaggaatggatgcaagagttcttgcgcgaggcccgtcgtcgtacggacttgatccgttgggacgcatatgtgacagaggattggtgggatcataaggctacgaacgatgagaaatacaatcgttatccattgcatcaattgtcattgggtgcgaacccgttgttggaacagaacccgggatattaataagttagacttaatataaaaaaggaggtatgttgcagaggcatacctcctttttctgatatggcgtggaaaacgcagtagtacttacttgactggagaatatatacttcatcgggcaaataagtatatattcgtagacgaagtaagtactactgcgttttccggcatataattttgattgatttataacgtgatgaaacaacaattaattagcttgtttttttgcggtgtattattattgcaagggtgtaccgaaaagaaaaatgaggcacaactagagaagactctatctgtctatcaagtagatttgaagtcggaatcacccaaagaaagtattgatagatttctggccggtatggagatccggttgttacctttggagtcgggagacagtatcctgtttaaaggctccgcctctaccatccatttggcagatgatgatatattccttttagatgcttctcagcgtgtgattttccgtttcggcagggatggtaagttcaagaacaagatctttcggaacgggcaaggcccggaggaatataacgtgctattcaatatggctttgtttgacaataaggtttatgctttggataatacgaagatccagctgtatgactatgagggtaattatctcaaaactgttcccctgaaaaatgatggtcgtcaggtagctgtcgctaaagatggcacgatagctgtcgcttccaattatatccagccttatcagctaaccctatatcgtccggatggtacgatctccgaatatttacctagcgataagaacttattgaaacagcaaatctctcagtccacctatcattcgttgaagagatatggcgatcggatcttgttgacaaattattttgatccatccatctatcagctggaagataccgtgtctgccttcgccacgcttgacttcaaaggcatgaatatcccctccaatatgtttagtggtacggatgaggagatcgccaaccggttccgtgaataccgcgagggagataaggccattctctcattcgatcgcttgaccgttacggacgactgggttgtgtttgcgccttctttgatctgggatccatgtgtggtttattataaccgtaagtcggatacttatcttctgaataagaactgggggcaaccttacgatttgttcttcggaggctacagggcaccggacggatatgatgagaagagccgggagttttaccaactggtcaatgccgtagagctgaaagaggtcgtaggggaaatcgccaaagcggccccgaattatcaagatacctatccgtttttgaagggtgtggatgtatcccaaatagatgataatacgaatgattggattgtattctttaagttacggtcttagaggatatataacttgtatgggagaatatgaccgatctctgtattatcttcaacgatgtgatctgctattagttcttattcaaaatgggaggaattgcgtttgatcaagcgttttttcctgccagtcaagcgtattgtcaaggaaagtttttgagatcatatgttcttatcttgttccgataaaaaggaatgtctatctttgttcatggtaagtatatctaaacgatcatcgttatgagtcagacaatttatcctatcggcatacagaacttcgagaagatccgtaaagacggttatctctatattgataagacagctttgatttatcagttggttaagaccggaagttactatttcttgagtcgtccgcggcgtttcggcaagagtctcttgctatctacgttggaggcctatttccaaggaaagagggagctgttcgaggggttggcgatggaacggttggagaaagactgggaggtatatccggtcttgcatctggatctgaatactcgttattataaagacactgccgcgctgactagtatcttgaatgaattcttggagaaatgggaggctctgtatggaacggagaaacagggacgtgccttggaggagcgttttagctatgtgatagaacaggcttaccgccagaccgggcatcgcgtggtgatattgatcgacgagtatgacaagcccttattgcagaacctgcacgatgaggatatgcaggatcagttgcggaacatgttgaagcctttttacggcgtgttgaagacgatggatggagccatccgtctcgccttgctgacgggggtgacgaagtttggaaaggtaagcgtgtttagcgatttgaataacctcatggacatatcgatggacgatcgttacgtggagatatgtggtatcacggagaaagagatacatacttgtctggaagatgaggtgagggaactggccggagcgcaagatatgacctacgaggagacctgcctgagactcaaagaatgctatgatggataccatttcgtggagaattccatcggtatgtataatcctttcagcctgctgaatacgttcgctcgccggaaattcggcgattattggttcgagaccggtaggccctcttaccttgttgaattactcaagcatacccattacgacctttatgagatggcgaacacggagaccgatgtggatgtgttgaacagtattgactctgcctcgataaatcccgtccccgtgatctaccagagtggctacttgacgatcaaggattacgatcctgaatttggtatctaccggctaggtttcccgaaccgggaagtggaagagggtttcgtgaaatatctccttccattttacacgagtgttagtgcgcccaagacccctttcgagatcgggcaattcgtacgagagatacgctccggtgattacgatgcgttcttccgccgcttgcaaagcttcttcgctgatacaccctatgaggtgatcgccggtcagaagccggagcgtgatacggagttgcattaccggaacgtgctttttatcgtatttaagttggttggactttatacgcaggtggaatatcatacctcacaagggcgtattgatctcgttttaaagaccgatcgctatatctacgtgatggaattcaagctgaacggcaccgccgaggaggcgttgcgccagattgaggagagacagtatgcgcttccctttgcgagtgatccgcggcaagtttttaagatcggcgtgaacttctcctctgtgacccgtaacatcgagcgatggttggtggaataataatctattaagtatatgaactggaaacaaacgcttttctggtctttttcggcagctgctattttttattatttcctgctttttggcgtgtttgtgtttgtcggtcaggaggagatgcaattgtttatacctgagtggtggtatatccgggagttcctttttcagccgggaggattttgcgctgtcgccgggcaatggatcattcaatactaccggcagcctatgtcggcggtggttttccatacggttttactcgttggttgcggatttatggtctataggatcttgcgttgtttttctgacaagacctacctgctgttcctttctttattgccggtcctgtatctggttaagatgagtattcatggggagtatttggtggacgggacggttggcgtggttttgatgcttttagctttgtcggtctcgctaaaggtgcggagggcgggttctattgccggatacggaattgcctctacactttttttatgtgggctgaccgggcttctatctgtctgttacgctttcttatatacgctgttagccttactccgctacaaaacgtcgcggcaaagattggccgcctctgcctgcttgatcccagcgctttttatctatttgtttagcggatggttagggattcctgtacctttgtctgatggatggatgccggaagcctatctggagatacagcgattacctcattattatatgtatcgtgtatggactttctttaccctttcgattgtcggtgttgctttattcgctcgctttgttccggtgattggcgagaagagtaaatggatggatcgggtagcccttgttgtttgtctgatcacggtgctggtatccatacggttttgcctgccggaaccttggcatgcgcaacgcatgatgcttgacgagctctctttcttagcccgggagaggcaatgggacgctattattgataagtaccggggaaagcagatctataattatgttagcttaaactatttgaatatgtcgttggcccataagggagaattggccgaccggatgtttactttcgatcagaaaggaacgaaaagcttatgtgccgattggaatcagaccttttacatggatcgtttattgagcgatgttcattttcttgttggcgatgtctctttgtctgaaagttttgcgatggacggatttacgcaagccaaacgtaaagggagtgcccgcatgttgcaacgtttcgtgcaagtttgtctgattaggggtgaggtggcgctggccaagaaatatttggacttgcttgccgctatgccattctataaagattgggcttgccgttatgctacctatctggtacatccggaattaatggataaagatccggagttgagtgacaaatatatgcctgttgagaaaagggatcgactgagtttgtccgtacctgtcgattccttatggagtggatacaatcttccggatcatcggatcagttgggaataccggggatgttattatttgttgggtaagaagctggatgcatttggccgattcttggaagaaacacctttcatgaagggggaaccgataccccggcatttccaagaagccggattgttgttggcggacaaagacagtatatcgctttcctcctattccatacagccggagatcgtagaccgataccgggaattcaagcaggttttgggacgatctgccaaccaagtggatgtgtcctcgatatatcgacaatttggagatacctattggtattatttctatttcaagatatttaaaggagaagaacaatgaagcgattatctatctgttggattataggttgtcttttggaacttgtagcttgtaggccggaagttcctacgcaagcggaacaaggagaaactgacgtgtttccggattacagggaagttactgtaccggtcaatatggcccctcccaatttcaagttggttgatcaacagctacaggggataattcggttgaaaactatgaatggggagttgataatcgcagccgatcatggtgttttcaacctgccggaaacggattggaaggtcttatcgcaggacgcacaaggaaaacaaatagatgtgacggtttattttcgagaacctcaaagtgattggaaacaaatgagtttccctatctatgtgtcaagagattccgttgacgcttatttggtgtatcgccgtatttttcccggatatcggatgtggaacgagatggggatttatcaacgatgtgttgaaaactatgttgaaaagtctattcttgataaccaatcgacaaataatagttgtatgaactgccatgccttttgtgagcgacaaggggaacaaatgctttttcatcagcggggttctcataatgggacttacttgattgatcatcggcaggtaaagaagattgcgttggaacgggacggtaagccggcttcgttcgtttatccgtattggcatccatccggccggtatgttgctttttctaccaatgagacccaccaggacttccatctttccgatgagaatcggattgaggtatatgacgtggaatcggacgtgctgatctatgacacggagaaggagagggtattcagttcgccattattggcttctatggcgtgttatgagacttttcccacttttactccggatggcaactatctgctgttctgttcggcggattctgtctgtatgccagaaaattatcgggatgtccggtataacctgttacgagtcgcttttgatccgaaagacggttcgattggaacccaagtggataccttatataatgcgagagaagcgggccggagtgttaagttcccgagagtctccccggatgggaagcggctactttatacggtgtccgattatggcaatttctctatttggcataaggatgcggatttgcatatgctggatctgtctaccggggcaatcgattctttgccggaagtgaatagcccggatgtagagagctatcattcttggagcggcaatagtcgttggtttgtcttttccagccggcggggcgatgggcttttcacacgtccgtatttggtgcatgtggatgagcgggggcagtgcggcaagcccttcttgttaccgcaagcgtctccggattattatgagcgttccctgttctcttttaatgtcccggaatttatacggactccggttctaatctcgaaggaaaggctggtcgaggcctcgggaaaagaagaggtcacgaccattaaacgtatcgagggcatctaatttttcgcttctttgtgccgaaggtatttataaaagtcgtacttttgcgctaaaatcaaaacgatgcgaaaagttcatttgatctccgtaaccgaacctttggttttagatctagccctagcacttcgagaaaaaggatatgaggtaagcgcttccggttgtggtctgactgaagagatgataggaagacttcataacgcaggctgtacctgttatggggatgggtggtttccggagaaattaataaaagatattcactcggtggttttgggtgctaaagtaaagcaagataacccggaattattgcgtgcgaaggaattggggatgttaatccaatccattccggaatttatatttcaacggactcggtcgaaaactcgggttgttgtggcgggtagtcgtggaaagaagacaattatttccatgatggtctgtgcgttgcgccggcaaaagttggcgttcgactatgcgttgactagcaaggtggactcgcttccgaatcggatacatttgagttatgaggcacgtatcgctttgatcgaaggagatgagcatatcacctctgccttggacaagcgtttccaattggaattctatcgtccgcatatcgccatcctgacgaatttatcttggtctaccgagacggatcatgcgactccggaggcctatttatccacttatcaatctttctccgtttctattgagcgggaagggaaattgatttattttggaggtgatgatactgtcagtcagttggcaggggacgtccggagcgatatcaccgctatcccttttgaggaacatccggtcgtggagaaagacgggcagacttttctgcatactcgctacggagactatccggtacggattcccaatcgctatttcttgatcaatctgaatgcggcacgtttggcttgccggcagttaggcgttaaagatgcggatttttatcaagcgttatcggaatatagtttatctttgccgatatgataatagctagacaaaaaagaaaagagaatatcgctgaatatctgctttatatgtggcaggttgaggacttgatccgagcgaataagttcgatatggattcgatcaaccgcacggtgatcgcccattacgaccagcccgaggaggtgaagaaggaaatcgctcaatggtatgaggaattgatcgagatgatgcgtagcgaaggggtgatggagaaaggtcatatccaattgaacaagaatgtgattattactttgaccgatttgcatctccgtcttttgaaatctccgaaagagatggtttatagcgcggcttattataagacgcttccttatatcgtacagctccgggctaaatcgggtggagaggatctgccggagctagaaacttgtttcgccgccgtatatggctatctgcttttgcgtatgcaagggaaagaggtgagtgcggagacgttagagggcattaaacaaatcagttccttcttggcgttgctcgccgagaaatatcgggaagatatgaaaggggaacttaaactagaggattaataatagatatagacatgaagacagttttggtaaccggagcgaacggtcaattgggaagttctatccacgctcgtatcagccagtatcccggctataattttctttttacggatatagatacgttggatatttgcgacaaggaagccgtccggaaatatgtcttggaaaatgatgttcaatatgtcatgaattgcgccgcttatacggcggtggataaagcggaggagcatgaggatttgtgtatgcgcatcaaccgggatgcggtacggaacttaggtgaggccgctcatgccgtaggtgcgaaggtgattcatgtatctaccgattatgtgttcgatggaacgagttgccgtccttatctggaaagcgatgcgacttgtcctgtttccgtatatggacgtacgaaactggcgggagagcaggccttgatggaggtgtgtccggattccgtgattatccgtacggcttggttgtattccgagtatggaaacaattttatgaagacggtattgcgtttgggaaaggagcgggatgagttgcgtttcatattcgaccaagtgggtacgcctacttatgccggagatttagcggtcgctatgcttgccgtgctggaacgtgccgaggcgggtaaatttataccgggtatctatcatttctcggacgagggggtgtgtagctggtatgattttacggtaaagatcttgcaaatagcaggtatgaataaccgggtgatacccatagagaccaaggattatccgacaccggccagccgcccgcattatagcgtattgaataaaggtaagataaaaagcacgtacggactgacgattccccattgggagactagcttggcctactgcatgaataacaaagtgtaactgataacaatatatacatataaaatagaatgagcctgtattcagaagagattgaaagaagaagaacgtttgccataatcagccacccggatgccggtaagactacgcttaccgagaaattattgttatttggtggcgctatccatgtagcgggagcggtgaagtctaataaaatcaagaagactgccacgtccgactggatggagattgagaagcaacgcggtatctccgtagctacctccgtaatggcttttgattattccgatcataagattaatatcttggatacaccgggccaccaagatttcgccgaggatacgttccgtaccttgacggcggtggatagcgttattatcgtgatcgatatcgctaagggagtagaggcgcagactcgtaagttgatggaggtttgccgtatgcgtaagactccggtgatcgtttttgtcaacaagatggaccgtgatggtaaagatccttttgatttgctggatgagatagaagaagaattacagataaaggtacgcccattgagttggccgatcgatatgggacaacgtttccggggcgtatacaatattttcgagcagaaactgaacctatataccccgagtaagcaatatgtgacggagaatgtggaattcaaggatatcacgagtccggatctcgagacttatattgatcctacgcaagccgcaaagcttcgtgaggatatagagttgatagagggggtttatcccgaatttgatgtgaatacgtatttggatggggatatcgctccggtattctttggctccgctctgaataacttcggtgtgaaagagctattggattgctttatccgtatcgctccctcgccacgtccgatccatgcggtagagcgtgtggtagacccgaatgaggataatttcaccggctttattttcaagatccatgcgaatatggacccgaaccatcgcagttgtatcgcttttgtgaagatttgttccggtcgttttgagcgtaacgcgaactataagcatgtacgtttcggtaagatgatgcgtttcagtagcccgacggctttcatggctcagaagaaagaagtggtggatgaggcgttcgcgggtgatattatcggtttgccggataccgggaactttaagataggggatacgttgacttccggagaggaattgcatttcaaggggttgccgagcttctcgcccgagatgttcaaatatatagagaacgccgatccgatgaaggcaaagcaattgaacaagggcatcgagcaattgatggacgagggtgtcgctcagttgtttaccaatcaattcaatggccggaagattatcggtacggtgggacaattgcagtttgaggttattcaataccgcctgttgcatgagtatgccgctcaatgtaaatgggagccgatcagcctatataaggcttgctggatcgagagtgataaccaacaggcattggagaatttcaagaaacgtaaggcgcaatatatggcgttggataaggaaggccgtgatgtttatttagcggattccggctatgtattgatgatggcccaacaggattttccggatattaagttccattttacatcagagttctaatatgaaaagtcgattctccatcctttgcttacttgttaatatcttgttgataagttgtgaacaggctccccaatactatgaggtatccggaaggcttcatacaccttatcatattaagtttgagcatactaaaccattggataaggagattgacgagcagttgaaatatttctaccacctgtttaatgcttttgattctacttcggtaatcagtcaggtaaaccagaaccgtgacatacgggtagatacgctcttccaaaaagtctttaagaaggcactggaagtatctgccgagacaaatggggcctacgacgtgacgtgcgccccgttgatcaacctttgggggtttggcttcagccggaaggatagcgtaacccctgcccatatcgacagtgtccgtcagtttatcggttttcagaaagttcgtttagaaggggatcgcatcgtgaaggacgatcctcgcttaatgatgaacttttcttctttggcggatggaacggcttgcgatatgatagctcagatgctggagaagaaaggggtccgtaattatttggtggagtttggtggcgagatgcgtgtgaaaggcgtgaatccctcgggcatggattggcgcttagggatcacgaagcctacggatgacgctgccggcatgaatcaagaactcgagcagatcgttagcttcccgaaaccgttaggaatggctacatcaggcaattatcgtaatttttatataaaggatggacgtaaatacgcccatacgatcgatccccgtgaaggttgccctgtacagcgggatatccttagcgctacgattgtcgccccggatgccatgaccgctgatgcgtatgctaccgcatttatggtcttaggttcggaggaggctaaatccttatgcgctaaagtgcccggccttgactattttattatttgttccgattcgataggagacgggtatcatccggaatactctgagggctttcgtcaatatctggtgactgccgataagtaatcagttaatttataatgtattaagatgtagttcttagaataggcattgtaaggtctttatgatgcccattctaaggatcatataatgcccatcgtaagcactctataatgggcattgtaagaaaggatatcttataagatggaccggatctcatccaaggagcggactgtataggttgggatgaagcctacggcaggtaatccttcaggattcaaccatatctggtcgatcttggattggtaagccccaatgatatcagcttcccagctatccccgatcattaagctctcggaccggcgtgagttcgtgttctttaaggcgaagtcgaaaatacctttatggggtttttgtatattagcgtcctcggacaggatcatccgttcgaaataaggagccaagcctgcgttgctaagtttcttgaattgtacctcacggaatccattggataaaataaataaccgataggaagggcgaagatattccaataattcaatggctccgggcactaatcgggttttggtggtcgtgcgttgcaagaaatcattatttaccgataagacggttttcttatcttctattcctaacggacgaagtacatagagaaatcgatccaagattaaggtttgccggtctatttcccccgaacggtacttggcccataagtctagattatgaggcatataaatatcaaagaaagcctcgaaggaggcataataccgattaaagtggtaatcggtatatagctcttcaaggcattctttattgttatggtacgtatcccaaagggtatcgtccaaatcgataaatatacttttataaatcattatccaacttcgatcactaaatacttgcctaggctccagaaagccttctcgtcatttattttcaaggtcaagtttccgtcttcatcctctacgaactcataagatccttccggatgattggattttagtttagccttgcttgcgaacaaaggaatttcttttacctcacggatatcgatagagataaaataatccttgttgaaaccactctgcaatactttagatttagagaacaggccaccaccggataagatcttctgttccttcaattccttggaagtaccgaaacagtagtaagccgtgtgaagggctttatcttgagcgttcaatttctcggattgagcggctgcggtagtagccagactttccacatcctcattcaaggaacttaccatctcgtccaattcttggatacgtacgttcttctttgccaaatcctcttgcaaagcgacaatcatcgttgccttttgatccagctcggaggaaagacgatcgatcgtctttcgtaatgcggaagattgaataccgcttttcttcaatttctcctccaactggctgatttgctccttgttcttcttcaaggtctcgctgatcaattgcatgttctgcttgatttgatctctgcgtgactgatttagctcaccgccggtttgttgttggattgtcaaataattctcggcatcacgtatagattgaaaatcagattcaatatcatttagggtggagagcatatcattaagctcatccgtgttcttcgtattctcgatacgtagagaatcgttctcagcctttagtttcttgtaatccgctgaattttggccgcaagaggccagcatggctgtgcagacacatactaataatactttcttcatgttctttttgcttgttaagttaaacatctttttctgtctctttgtcctttttatcttttaagcctgctaatacaataacaatctcaccccttggttcgttcacggtaaaatgctgaattacttcttctaaggagcctcgtacggtttcctcgtgtaatttggatatttcccgggatactgatacttggcggtccgtaccgaaaaactcggcgaattgtgtcaaggtcttgagcagacggaaaggtgattcataaaaaataatagtccggtattccaaagccaattcttttagccgggtctgccttcctttcttttgagggagaaacccctcgaaacagaacttctcattgggtaatccggacgctaccaaggcgggcacgaaagctgtagctccgggcaggcactctacgtctaccccttggcgaacacattccctcaccaacatgaatcccggatcggagatggccggcgtaccggcatcggaaacaagggcgatattctcgcctcccttgatacgggccgcgatttgctccaccgtcttatgttcattgaacttgtggtgggactgcatcttgttttgtatctcgaaatgtttcagcaagatgccggtcgtacgggtatcctccgctaaaataagatcagcttcttttagcacacggatcgcccggaatgtcatatcttccaagttaccaacaggggttgggactacagtcaattttgccatatcgtatatttatgagaagcgtttttccaatagcttgatgaaatcggctacggaagcgtcttctatattccagttcaacaccttgttcagataagtgaccgattcctcgtacgagctaagatcgttcaggtctgagatcgccttattcattttctcctcatttcctccgaataattcccttctgaagcggaaacgatcatttaaactgaatgccttacggaaatcagaaagattctttttctccaatatatcattcagtgaaatactggatttatccgctaatatagttttatgtggaatctctatctctttcaaggggattgtctcttgtacgatcttttcttctgggatcactttttcgacaattggttctactacgataggttcctcaacgaccggttcttgtacctgtacgacctcgatcgtaggggatacttccggagccggttgcacctccggcatctgtaaaggtttacttacgggaatagaatcgataagtcgttgatgttcctccatttgtttacgcaaagcctctaactgaaactcctccagcgtatgaagctccttcaataccttgtgggtcaactggaaggtctggttgaagaaagaggcgggataaatttccgcgtccctcattccggctaccaacttctccagctccctgatatcgatcaatagataatctattttttccttgtttgccatttctatatgtttttcagatgctataaatcatccggacatacgtatgttttgcaacaaaaataagtatttcttgtcaatgttgccagtttcgatcttaaaatattgtaaatcattcgacgaactcgtccggtaaattcaccagatataggtgatgggtcgcccgggtaaaagccgtgtagagccaccgatagaaatcctcaccaagcatttcctccgtgatgtaaccgatatcgagaaagacgttcatccattggccgccttgggctttatggcaggttaccgcataagcgtattttacttggacgacgttgtaatgaggatctaccttcatctttttcatttttcccgccttggtaggaatgtcctcgtaatcttccaatatggtgtaaaagagcttgtcgtttagctccttagggagggcgggggagtcggtctgtaaagtatccaataggattttcaaatcgatttccagatcataatcttgaaaacgagccgtgatgtcggcaaagcggaagccatacatctccgtgacacggcgtacccgcatgacttgaatgatctctccgttcgctataaagtccatctccttgcaattcgctgtccaataataattgttcttcgctaccattaaacgatcgccggacgatagctcttcttccctgtataggatacggttacgtatgccgttattataaatcgttgctcgtttattcgagcgggagataatcattgtctcttccataccgtcgcggctataggcggaagatatttcctcaattagctcatctccattgactttcgtgaaatcggagaagccttttaattgtaatttcggaaagatctcgaccgtgtggtttcgtagtgcgtctcgtagccgggttgcgttgaacaggattcccgagtcctcgctttggcgtacgacttgagttaacgctatctcccaaacctgtaggttgtaaccccgtaatatctcgggattcaaggcgggactctccgtttgcatcaccggaggaagctgtgcgacatctcccattaggataagacggcagttttccccggaatagacatactggattaaatcgtccaacaggcgtccggagccaaaaacaaatgaatccaatccctcgttggcgatcatagaagcctcgtcgacgataaaaagtgtatctttatgtaaattatctgccggcatgaagcccgtcggctcattggaaaacgcccgttgacgatatatttttttatgaattgtatacgctttttggccagcgtagcccgagaaaactttagctgctcgtccggttggagccaacaaaaacgttttttgctttagttcgttaagcgttttcaccaaagccccgaccagagaggtttttccggttcctgcgtagcctttcatcagtagaaggctgtccggttcctcagacaagagaaattcggtaagcgtatgaagcgctaaaaactgatcatccgtcggtttataggggaaatttcgttcgatttgctggcttatgtaactatttatcattttgatcgcaataattttcgcgataaaggtagtgtattaaatattcttttttaaatttgccgaacgaaataaattcaaaaaacaatacaaaccatgaaagttacattaaagattttattagctgccgcagttgtactgctagtttacatgtgctacaagagcgtcactggtccgattgagtatgatgatcagaagactattcgtgacaatgcgatcatcgcccgtttgattgaaatccgtaaggctcagatcgaatacaagaacatgtataagactcatgccggaagtttcgacgatttggagaaattcttgaatacggataagttgccgttcttgatcaaggaaggtgtattgacggatgagcagttggagaaaggtatgacagaagcagaggctgttaagaaaggtttaatcagacgtgataccatgtgggtattggcgaaagatactttgctgggtaagaactatgatgtagcggctatgcgttatgttccggccgttccgggtgaaaagattactttcaagatggatacggctacgttgaaatctggttctggttatgagatcaaagtattcgcttgtgaggttccttacaaagaatatttgcgtgacatggatgctcagttgacttataacttgatcgacaaggcagagaaacaaggtaagttcccgggattgcgcgtaggttctttggaagaaattaataacaacgcaggtaactgggaataatcagcggctcatatgactatcagcattcctgatacgttaactactgataattcggaaaagtatatagtgtccatccggcttcggtcgggtggactttctttttccgggtatgatccctcggctggaggaagtttcttttatcgggaaacggaattcgatcgggcggtctctttcatttcttcccttaaggagtttttcttcgctcatgagtttcttacgtggacttataaacggattaacgtgatctgtgtatctccggaatatagcttggtccctgataattattggggggacggtaaggaagggcatttattggatttctgcttttctacactggaattgcattgcttaaccgatattttaaaggaacaacaggctaagttggtgtttggtgtggacgaggaggtttacgaattttgctcccgttctcttttgcatccttttttctcccactacatgacttctccgctaacgctatggacaaaagaaagtagtgctagcttaccccggcaaatgtatgtcgtgatagaacgaaagcggatggatgtggcgtgctatgctcaagggaaactcttatttgtgaactcttacccgatcgaccaatcggacgatatagtatactatatattatatgtatggaaacaggcgggattggaccaagaaaaggaccagttgcttttagcgggggaatcttcctcgcgaatgcgggttctggagcgattgcgagcctatttacgccatgttaagccggtggagatcccttcggaagcctatttgctgggaacggatgtaacgaaagcccctatggatttaatatctttattaatatgcgaataataagcggtatatacggtcgtcggcgttttgacgtgccctcttcgtttagcgcacgtcctacgacggattttgcgaaagagaatatttttaacgtagtaaataatttggtggatctggaaggtatggatgcgttggatctttttgccggaaccggaagtatctcttttgagttgatctcacgaggatgccggaatgtaaccgccatagagaaaaataacgctcatgcctcttttatagccaaggtagcgaaagagctgaagacggatgcgttggctctgattcgtggggatgttttccgttatttgaattcagcccctaagcaaagtttcgatttcatctttgccgatcccccatatgccttgccggagttgccggaaatacccgccttggttttcgagcgtgatttactaaagaatggagggatattcatcatggaacatcctaagaccaatgacttctcatctttgccttatttttatcagcaccgggtgtatggctccgtgaactttagcatcttccttaaagaaggggagaaaacagacgcataaatgattccgccatgcgttgcttgagggggcgctttaaccagcgggaagggatcaagcgctcacagtgatgcatgtcgcgtgtaaagatgcgtttcatttgcagggcgaattccttttgatatacgaaagcgttaatctcgaagttatgctcaaagctacggaagtccatattggcggacccgatgcttgtcaatgcgtcgtcggacacgactagcttggaatgcaagaagcccggtttgtagaggtatacttttacgccggcctttaccatctcgtcgataaaggaatgactggccatattcgctgaacgtgtatcggaacgcttaggcagcatcaaacgaacatccactccccctaaggcggcggtttgcaacgcttggttcaatccttcggtaggcaggaaataaggggtttgtataaagatatacttcttggcgttggcgatcatgaaaatggtcgcttgcaacaaagttctccattgacctaccggaccgctagtggcgatttgcataatattatcgctatagatttgggcggccggatagtaaatccgatcgttcaagagttttttactaaccacgtaccaatcgatgaggaatacggattgaagcccgtgcactcctttccctacgaatttgaaatgcgtatccctccatgtgccccaagaagttcccttatcgtatcggtcggctatattcatgcctcccataaacccgactttaccgtctatcacgataatcttgcggtggttccggtaattcaccttactggtgaaaacggggaacgctaccctcaagaacgcatatacctcgatacccgcttccttcatttccttaaagaagccgtcttttacattccagcaacccacatcatcataaagtacacgtaccttcacaccttcttttactttcttgataaggagttgttgcacctgttttcctatctcgtcatcacagaatatataatattgtatatggatatggtgggtcgctttctggatctcttccagcaagtctttgaacttatcggtaccattcgtataaatcgtgatttgtgttccgtataggagggaggattggttggtgttagtcaacaaggtcgataaaggtttataggggtccggaactacgcaggcgtcttgaggtaatttaccctcttgcggccttttcatgatgcgtttataggtacgcctcgatatgatccgttgtttccggttatcttgtccaaagaagaaatagaaaagcagtccgataccgggtgctaataataagacgattacccaaggaattgtctttaacggattcctattctctgtaatgataactaataccagtcctaatatagtgacgctatacaatatgataaatatcgtaccaacgattaactgtatatgaatggctgctaacatgaaactctctctttgctataatctgctaagataagaatgctttccgagaatagcaaatttccgtattctttttggactgtatagaagggccaaaaagtaagttaacttaaatggcaaagtaagctaacttaaatgcccgagtaagttaacttactttgccaacgaagctagctgactttggatgcggggttatgtacatcttaaaataatgaggtcgttctctaaatataaagtgtcatttgttgattttggcgcaggatattatgagaagtatctatgataacaataaaaatatttagattgaaaacgactgtaaaaaacgatcgtttcaattagtcgtttgcaaaggtaggcatttctccgagaccggcaaccttttccgattaaattttgtcctgctatatatcttcttctcaacaggatagattaatcaaagtgtcacgaatatgacaaaagagcatcatctttttactttctaaaaaaatgcaagatctaaacgatcgttttcactagtcgttttttatgtggaagggtaagaataagaaaaacagtaaaccaatgataacttggaatcaaactctagagatatgaatagaaagtcttctatacgagccattttactccgtaaggaatgccttttattctttttgctactattgcctatgtttacaaaggcccaatataataaggtatatgcggatatcaccgcgaatatgctggtcgatatgggttttgagaatgttgtctggtcggaagacgagaaggagagagtgtatgtcttggagaataccccttggcgtttgcagggtgtgggactggcccatgccatagaccgcatccagaaaacaggcttgccggagaagggtaaatcctgccgtatcgtcgtattggataataatataccgcagatctcattgatctatacggcaaatccggacagcttgaaggcggctcccggctcctatgcggcccgttccgcctgggatgctacttacgatctgggcgatagctgggataaggtgaaaaaagagtaccgtatgaatagctccttatttaaagtagacgtggtggtttatccggagttgtatctgaagaacctcattatcacgcaaatataccaagtgttattcaacctctcgcctgcgatcgaggtctctttctggaatgggatgaagctgacggcacagatggtgtttcctatatataatgatggatatggaaagcggatggataagattcacccgggaacaatcgctctttctcaatcattccgcttaccgatgcgtacgtttgcgagagtaagcgtagggttgtttgattcggatcgctatggtatagatttgaaggcggtacattatttcaaggatgaacgtttttctgcggaagggcggattggttgtaccgggacggggtattggaatgggttcgaatttcattatggtaagcatcaacgaatcacttggtcgttgggggggagtttctactggccaaaatacaatacgcagatatcgttgaaggcggaacaatatttattgcatgaggttggaggacgaatcgacttgattcgtcatttccgatattgctcgattggtttctatgcgatgaaggcgcaaggtgctttgaagaatggaggttttcgcttccaagtggctcttcctccctataaatacaaacgtaaatatgcaagggtgacaacttccgacaattggggtatgtcttataatgccggaaacgaacggtattactataagaactattatgcgttgccggaagataacatgatgaagcaaaatcaattcaacccgtactttataaagtcggaattactcaatttttaaatagttttattatgagaacaattacaaagttacagaccttattggtcttgtttttgacaacagccatgattggtttcgttggctgtaaggatgacgatggggatgtgcctgggcctactccgggcaatgaagccacttatgcgatcagtggtaaagtgacagacgtggacggtgctgctatggcggatgtgaatgtcgcgttatctggagctaaatcaatgtccgctaagactgctgctgacggacagtatactttcgacttgggaaagaatgctgccggagcctataaggtgactttctctaaagaaggttatatcgagagaagctatgatataaccgttaagaaggtagaatccggcttgggtgagaatatccagaatgctgtgatggaaaagggaacaactcccgagcctacgccggaatacaagaaggcgaagtatttcttgaccgttagcgtgaaagacgaggctggaaaagatattaccgcttccgatctttcagtgctcgttaaattaggtgacaaggaaatcgctaaggagaacaaggctagctttgagttgtctgacgtggcaacgggtacgtatgatattaccgctacggcttccggttatgagaagacagtcgctaaagttgttgtttctccggttgaggaccaagagaaggctgagggtgacggtgatacatttgacgtgaagtatccggctaatttggtattgaaggcttctacgcctactccgacaggtccttcttatattgtggaaggtgatgttaaggatgtgaatggtaaagctgttaatgcgacaattactttgtcgggcgctttaacaaagatgatttaccgttctgggtttgagactcagactgtgacaggctctcattatcgttttgtaattcctcaagatgctgttacggctcaaatgagatttacaattcgtgttgtcgcagagggatatgccgcatattcttacaactttactttggatgagctgaaaccgggtgagactgcgaatgtgatcgctgatttccatttgacacctgctacaccgactccagatccgactccaaccccagacccaaccccagatcccgatcctgtaactaagggcggagaggtttctaaaccgattacagaggtgaatccggaaatcggcgttgagcaagtaggtaaggtcgaggaaaagattgaagctaatcaagagaaaaaggtcgaggtaaaagatgagacaggaaagacagtagaggttgctgtaaagataccggaggctgttgcggataaatatgaatctggcgcaaatgtggctgttgccaatcctgagacattcgctgcaagtttgggcaagattgaatctgtagtagaggacaaatctgaggttgatgaaatttcattctctaccgaaggttctaatacaggtgttgttatcgtgactcctaataacactacggaggatttctctattaaacgtgatgctacggtggaattaacggttaatagtgagaaagcagcggagattgagactggaacggatgctagcacagtagcagaaagcggttctccagccgcagctgttacccgtatttatacaggaaagcctgacggtacggttattattccggctatggtgattaaagcttccgctcctgcggacttcaagaacgtatccgatatgcctctaaaccttctgtataagaatggagataattgggtagttgataaagatgctaaagtagagctcaagaatggccaattgaatatccctgtagctcactattctcaattcagcgcaggtttattgatggcggttaagactacaaccgctccttctgatagtacgttctttatcgagaaatcggagtttggagaatacaacaagatggtttcggtagagtttacttataatgcgactttcttaaataataaagatttggataaagctgtcctttcagttccgtatggaaatgcggctaaggattatttgaagaactgcttaggcaagaaaatcaacgctgatggtggtctgatctctttcaaaaaatcatatgacgtgaaggtcgacgaaggcatgactcttaagggtgtaaacattactgttaagtatgcggctaaagaatatgttgtctactatctgaataaaggtggttctttggaatcggtatctgttacggtgttgagcgtgaaagaggctaatcctgctcctctttatgagcaaagccacggacatggccatggcaatggaaacaatgccggaggcggtatttttggtaaataatcaacaagaagactgacctccctataaataatgttgagccggaagtttataagtaaacaaagaaaaatgaagaaattactcttattgatcatattcttaagttgctggacgatacttccggctcaattatcttatggcacgacagggctattgcatgccccgtccgccgatatgcaaaaggacaagaccgtgatgcttggcggaaacttcttgcatcaagagcttacgcctcccaagtttaattttaatacgtggaattattatttgaacgtgacgatcttcccgtttctggaagtagcgtatacttgtacgctgtttacggccgagagccttggattggataagtatggctatttcggattcacgaaccaagatcgttatttctccgcccgcttacgtgtgttgaaagaaagcaaatacatccccgctgtcgtgctggggacttcggacccttttacgtcatccgggcataaattcgcttcagccatagggaacggctatttctgccgttattatttggccgctaccaaacattttcagctgggaagggaaaccttaggcgttcatttatcctatctgtataaccgccgtgaggattatcccttgaacggtgtagcgggaggtatcacctacaatccttcattcgccccgcatttgaacgtcatagccgaatacgattcgaaagacttcgctatgggagccacttacctactattcaatcatatacattttcaatttgaattgcagcgaatgaaatatttctccggtggactgtgctataagatttatttaaaataaaaagaggttcagcttttgtccgtttttaatccgcttggaggcgaacggttaggctgaacctttttatatcttgttacgctgtcgcgctagccatatctacggctttattccccgatgaaattcttgcgtatcaactcggcggacttgtactcctcttccagatacgtctcaatatgccgtttcttcttatcctctaatatctcgttaatagctattaagatacccgtttcttccacctctccaaactcatggttgatcgctgtgccgaatacacgcatcttaggcgacaagctcatgtaagcatttaccaaaggaggcacgttgatgccaaatttacgaacctcttggttcaataccttgtagttatccttgaaattatcgtgagggaaaagagatctcatcttctctacatccatattagtctccaaaggatataccggagtgatcagttggtctgcgtccgggaaatgcaatccgaggaagtataagatcatattacgggcctcttggttgtacgtattgtacatagtcaccttcccgaaataataccgcaagctcggatcaaccacggataaagctcccaatccatcccacaggttatccaacacgaacaagcctttcgccccggaacgggtggattgatactccagagccacgaacgagcgtcccaactctaccgtataaggaaggatctccttgataaatttctctgagaaattaaacaagtgcgaggtcgccaggatcggtttaccattctcgtcgaacttaacgtctgaaccgcaaaggaaacggtatccccccaagatctgctcatcttccgggctccagacaatcagctggcggtaagcgtcttccatcgtgtcatactcatcgatatccaccggaaatcccgtgccacccccgtaataacggaaagcgacctcccgcagacgccctatctcttgcatgacattgggtgagtcgtgcgccgtgacgatataaatctcattcttcgatttattggtacttctcaacctcttctctttggtcaattcagccttcagtagtgccctgtctatgggattgataatgtcttgcatatgtttcgtctgttaatccttgagtttgtaaaccttgttttttatccactcagcccattcggcgggtttcttgctattgtcgaatgtctgccaagggataggcttcccgaaataaatccggaaggtcttatgtttgctccggaacatctcgtccggtaaataaatcatctcataattcatctttatacccaacgccttgcgtatccgggcgaggttatagaagaaattggaattcttcccgtcgaaatagaccggtacgatatcccgcttgtattgcaccgccttctggatgaacgatttcttccactccaagtcttgtatcttgccaccaatcttgcgagagcataatccggcggggaaagtgatgatctggtcgtccgaggcaaaagcctcctccagcatccgtgcgttgtcctttccttgggtgccgtgtttgttgatcggtacaaagatggattttagattggagagataaagtaataaatcattgaccggatacttgatgcgcccttcgaaccgggaaccgataacggcggagagacagataccgtctaatcctccgagcggatggttggaggcgaagatatagcgcccttcggtcgggatgttttcctcatgtaccagattgagggtaaggtcaaaatagccgataagctcacgcatgaaatctaccccttccttatcgtggtaacgggttaatatatcattcagttcctcttgatgaaccgtgcgaatcaagtagtccacgataaatcccggaatcttgcgtgacgccttgggcgccttttgtgccaatacttgcttaatatctatctttgtcacaccttgttttgtcatctatataagcttgtcaaggggcaaagataaagttaataattaaaacgagagaggtttgagtgaagtttttgctttttcgccagctatcttagccttttccccttgatcttttagccgctaccattagggaggttagtccccgggagcttgactatcggttatctaacggctgttggacgatcatgcaccatctgttagaagatcatctaccaactgttgcatgatcgtccaacagccgttagaagatgaaggtgaaaggaagaattggttaacggataccgatgaaaagcgtaagagataaggacgaaaagacgaagggttaacgacctgttgataactttttcctacttttcttatataaatgttggcgggtaattttggaaatgtgtacttttacccaccgataaggcatgtgcgtgcgtatcaaaggagtacggcgcttgattttaagaggaagtttaacgtaagaacgacgaatggaagaaaaagatagttgctatcatgtaccggtaatgctgcgggaaagtctggagggattggatatccgtcccgacgggatttacgtggatgttacgtttggcggtggaggacattcctgcgagatattgaaacggttgggtagcgagggcgaactttacggctttgaccaagatgcggacgccgagcataatgtcccggcagacccacgattcactttcgtgcgcagtaatttccgttatttgtataattttatgcgttactacggagaaagtggggaggtggacggcctgttggcggatttaggtgtctcttcccatcatttcgacgataaggatcgcggtttctctttccgtttcgacgggacgttggatatgcggatgaatacgcgtgcggggcagaccgccgccgatatcgtgaataattatacggcggaggcgttggccgatgtgttttatctatatggcgagctgaaggtgtcacggaaattagcctctgtgctggtgaaagctcgtgagacaaagaagatagagacgatcggagacttcttggaggtgatcaagccgtttacgggaaaggacaaagagaagaaattcttggcgcaagtctttcaggcgcttcgtatcgaggtgaacgatgagatgagggcgctgaaagagatgctgcggagtaccttgcgggtgttgagaccgggaggacgattggtggttatcacgtatcactccttggaagaccgtctggtaaagaactttttgaagaccggaaacttcgaggggaaatgcgagcaggatttcttcgggaacgtacgatcgcctttccgcttggtcaataataaggtaatcgtcccgaccgacgaggaggtggagcggaatccccgttcccggagtgccaagttgagaatcgctgagaaggtataaggagaaatagatatggaagaaaacggacaacataagaaaacgaggaagaaggagaagcgtctttcgttctggtatatactcggtggcggcgtgctaaaagaggattttatcttgaggcatacgcgcatgatcgtgttacttgtcgtgttggcgtttttctttatcggtaaccggtatacttgtatgcaaaagctgcgtgagattgaccggttgcaacagcaattgagggatgtgcgtttcgaggcgttgtcgatctcatccgagttgaccggcaatagccgccaatcgcaaatcgagttgctgatcgaggagcaaggtattgatctggagggtgcgaaaacccctccttatgagttatataagtgagataaggtgtaaataggtatgtctgaagaaaacgaaccgaaagaaatagagcctaaaggtagccggattttattctgttacttcgtggtcgtgctgttgctggggcttgtggccgtaggaatcctgttccgtgcctttgatacggccttcgtggagagggataaatggatgaaggtggccgagagccagaaacgaccgaaccgtttggtgttgcccggacgtggcaatatctattcgtcggacggtaagttgatggctaccagcgtgcctcgttattatatgtatatcgactttaaggcggatgcgtatactccggctaaggatgccaagtataattggctggatacgttcaagacgtccaagaaggatggggtggactcgttggcgttttatctttcccgtaaattgaaggatcgtacgccggcgggctataaggcttatctgctgaaagggctgagcggtaaaagccgccagttcccgatttacgcggggaaggtctcgtattcggacttgaaggagatccgtaagttcccgttccttcgtctgggacgttataagagcggtttttatacgaaggagatggtgcagcgccagaaacctttcgggaccttggcgtctcgtacgatcggtgatatctacggagagatcgaggagggtggtactacgaaggggaagaatggattggagttgcaatacgattcgctcctgcgggggcaggccgggttgagttccgttcgtcgtgtcggtggaggctggacgaacgtgatcgaggtagatccggtggatggcatggatatccgtaccacgatcgatattaatatacaggatataaccgagaaatcgctggtcgataaattgaaggcgatcgatgccgagtccggtacggctgtcgtgatggaggtcgagaccggagagatcaaggcgatcacgaatatggggcgtatccgtgagggcgtatatggcgagacgaagaaccatgccgtggcggacgagatcgagccgggctctactttcaaggtggcctctatcatggtggccttggaggatggtttatgcaatccgggggatacggtcgatgtaggcaatggtatatatatgtataagggtgcccgcatgacggaccataatatgaataaaggtggatacggccggatctcggtggagcaggcgatttggtattcctccaatatcggtgtggccaagacgatcctgaaaggttattcggataacccgacaaagttcgtggagggactgtaccgtatcggtatgaacgcggatcttcgtttggagataccgggggcgggacgtgccaagatacgtcgtccggatgatacgacccgttattggtccaagaccactttgccttggatgtcgttcggttacgagacgcaggtaccgccgatcaatacgttggcgttctttaatgcgatcgcgaacgacgggaagatggttcgcccgatgtttacgaaagagatcttacataacggcaagaccgtgcagagtttttccacggaggtgatcaactcttcgatctgctcggaccatacgctggcgttgataaaagatatgttgctgggagtcgtggagaaaggaaccggtaaggcggttcattcggatattgtccggatcgccggaaagaccggtacggcgcagatcgctacgggcggtgtctaccgtacgagcgggcaccaagtctctttctgtggctatttcccggccgatcatccgaagtattcttgtatcgtggtgatccgccgtccccgtattggttatccttcgggcggtacgatgtcgggaggcgtggtgcgtgcgatcgccgagaagatatacgccagccatatgtcgttcgatgtccgggatatggaacgggattcgacggccgtgatggtacctcgtgtgaaaggcggcgatctgagggcggtagaggacgtattggatgaattggatattaaggcggatacggacagtttggagacaaagtgggtcgtagcctccgccgagcaagaagagaataaggtgaaattaagcgatctgacgattcgtgagggattggttccccgggtagtcggcatgggtgctaaagatgcggttttcttgttggagcaagccggtctgcgtgtctctttgtcgggtgtcggacgggtcgtttcgcagagtattcaacccggacagcgagtgtctaaggggcagaccgtattattaacattgaaataggtatggaactaagggatttaatcggtgcgttggaagctcctatgttgatgggggcggataatgtggatatcacgaatattcaatcagactctcgtcgggtgacgaaagggtctttgtttgtcgctgtgagaggtacggccgtggatggccatgcctatatggacagcgccatagagaagggggctgtcgctatcgtatgcgaggaggctccgtcctatttggaggggagatgctcgtttatcgtggtgaaggattcggcggaggcgttgggtcttttggtttcccgctggtatggtgatccttcccggaaattggtgttggtaggcgtgacgggtacgaacgggaagactacgatcgctaccttattatatgagatgttccggaagatgggacataaggtgggattgctttccacggtatgtaattatatagatggcgaggcggtaccgacggatcatacgacaccggacccgcttacgcttcattccttgatggcccggatggtagaggccggatgtgagtatgcttttatggaggttagctctcattcgatcgatcagcggcgcatcagcggcttgtctttcgacggggggatttttacgaacctgacccgcgatcatttggattaccataagaccgtggagaattacttgaaagcgaagaagaaattcttcgatgacctgcctgccgggacttttgccttgacgaatgccgatgataaatccggcttggtgatgttgcagaatacgaaggcgaagaagctgacctattccttgcgtaccttggccgattttaagggaaagatattggaatcccatttcgagggtacagacttgatcattaacggtcgggaggttatggtgcatttcgtgggacgtttcaacgcttataacttgctggccgtgtatggtgccgcggtttctttagggaaagatcccgaggaggtgttgatcgtgctgagcacgcttcgctccgtatccggtcgcttcgagacgatccagtctccgctcggttatacggcgatcgtggattatgctcacacaccggatgccttgacgaatgtactgaatggcattcatgaggtattggacgggaaaggacgtatcattactgtggtaggtgccgggggaaaccgggacaaggggaaacgcccgctgatggcgaaagaggctgtcaagctgagcgatcaggtaattctgacttccgataacccgcgctttgaggaaccggatgatattattaacgatatggtagctggattgacgaaaatggatatggaacgtaccttatgtatcacggaccgtacgcaagcgatcaagaccgctacgatgttggcgaagaaaggggatgtgatccttgttgccggaaaaggccacgaagactatcaggagatcaagggggtgaaacatcactttgacgaccgtgagaagttacgcgagattttttcgacacaacaatcataatatttaagacgacatgctttattatctttttaattatttggatcagttggatttcccgggagcgggtatgtttaagtacgtatctttccgctcggggttggccttgatcttgtccttgtttatctctacggcgatcggccggcgtatcatcgataagttgcaaatgttgcagatcggcgagacggtgagaaatcttgggctggagggccagatgagcaagaagggaacgccgacgatgggaggtattatcattattatcgctatattgatcccgactttactgtgtgccaagctgaataatatctatgtgatattgatgttggtgactacggtttggctgggagccttgggattcgcggatgattatatcaaggtgttcaagaagaataaggagggcatgcacggacgtttcaagatcgtcgggcaggtaggactgggcctgatcgttggcttggtattgttcatgagcccggatgtggtgatcaaggagaatatggaggtgcgccatgataacgtgatcgaggaggtgcgttatcatacggtggagaccaaatcgacaaagacgaccatcccgttcttgaaaaacaataatttcgattacgccaacttggtgaactgggcgggcgattataaggaggaggccgcgtggctggtgttcgtgctgatggtgatctttgtggtgactgccgtgtcgaacggagccaatatgacggatggattggacggcttggctgccgggacatcggcgatcatcggggtggcgctcggtattttggcctatatgtcatcccactttgagttcgcctcgttcttgaatatcatgtttatacccggtgcggaggagttggtggtttatgccgctgcctttatcggtgccacggtcggtttcttatggtacaactcgtatccggcccaagtatttatgggagatacggggagcttgaccttgggaggtattatcgctgttttcgcgatcatcatccgtaaggagttgttgattccgatcctttgcggtattttcttggtggagaatatatcggtcatgttgcaagtggcctactttaaatatacgaagaagaagtatggggaaggtcgccgtatcttcaagatggctcctttacaccatcatttccagaagccgggaaacgcgggtatacaggcgttgatccaaaagccgttcaatgtcgtgcctgaatcgaagatcgtggtccgtttctggttgatcggtattattttggctgttatgacgatagttacgttaaagatgagataaaagatgagtaagagaatggttatattaggggccggggagagtggcgcgggagccgctgtcttggcgaaggcgaaaggattcgacgtgttcgtgtccgataaatcgtctatcaaacctaagtataaggagatgctggacaaccacgggattcgttgggaagagggacagcataccgaagccgacatcttgaatgccgacgaaattgtcaagagcccgggtattcccgacaaggctcctatcatacagttattgaagaagcaaggtacgccgatcatctccgagatcgagtttgccggaaggtatacggactcgaagatgatttgcatcacgggtagcaacggcaagacgacaacgacgatgcttacgtatcatatactgaaagaagcgggcgtggacgtgggcttggccggaaatgtcggaaacagcttggcgcttcaggttgcggaagatccacatgcggtctacgtgatcgagttgagcagtttccaactggataatatgtacgactttaaagcggatatcgctattatattgaatataacaccggatcatctggaccgttataactatgagatgcagaattatgtagacgctaagttccgcatcttgcaaaatcagacgaaggacgacgccttcattttctggaacgatgacccgatcatagcccgtgagatcgccaaacggcatcctgaggctactctttacccattcgccgagacatatgagaacggcgtgaagggatatacggaaaataatcaagtagttattgaaacggcaaacggaacatttacgatggaacaagacctattggcattgactggtacgcataacctgtataactctttggcttcggggatagcgtccaagatcgtggacattcatgatgagaaaatacgtgcctcactcagtgatttcacgggtgttgagcaccgtttggaaaaggtgcttcgcgtgcgtggtgttgattatatcaatgactcgaaagctacgaacgtaaactcttgttggtatgccttgcagagcatgacgactccggtcgttttgatcttagggggcacggataaagggaatgattactcggagatcgaggaattagtgaataagaaggtacattcattgattttcatgggtgtggataatacgaaactgcatgcgttcttcgacgggaaagtggcgaatattgaagacgcccgctcgatggaggaggctgtggcgaaagcttataagatggctcataagggagatacggtattgctctctccttgttgcgccagcttcgacctgttcaagagctatgaggatcggggcgatcagttcaaggcttgcgtacgtaatttgtaataaaggataaaatggatctggcgagtaaactgtttaagggcgaccgggtgatatggatcatcttcatgttcctgtgtcttatatcggtggtggaggtgttcagcgcgaccagtacgatcgcttataagaacgcgaatcactgggcgcctatcgtacggcacgccacctttttattgggaggtttcgtcatggtattgctgttacataatataccgtgtcgtttcttctctgcgtttattatattattgccggtctcgatgttgatgttgatcgtgacgccctttatcggcgtggacgctaatgacgcacatcgatggttggaaatcatggggatacagttccagccttcggagttcgggaagctggcttgtgtcgtgtttgtcgctttcttgctcagtaagcgggggaaattaacggagaaccagatttttaagtatatactgattggggtaggactgacctgtgtcttgattctgccggagaacttctctacggcgtttatgctattcggggtttgtttcctgatgatgtttatcggtcagttgccatttggtaagttggcgaagctggcgggcatcttgatgttggcgttggtattgttcttggcgttgcttaagtttacgccagccgctattacccagtatttgccggatcgattcgttacttggcaggggcgtttggagcgtttcttcgacgggcataaggataatttggatgagagtggtacgtataagataaccgatgataattatcaggtaacccatgcgaagatagctattgctaggggaggcgtattaggacagatgcccggacatggccaacagcgtgacttcctgccacaggcgtattctgattttatctatgcgattatcatagaggaactgggtatcgttggggggatctttgtactgttgctttatataatgctgctagtgcgggtcgggatgatcgcccggaaatgtgataaatcattcccgaaattcctagtgttgggatgtgggttgctggtggtagtccaagccttggcgaatatggcggtagccgtgaatttagtgcccgttaccgggcaaccgatgccgttggtgagccggggtggtacgtctacgcttatatcttgtatctatttcgggatcatattgagcgtaagtcgttttggagccaatatcggaaatgaggatgaggaagaggaggatacggagaatccagagaatccttccgacgagccatccggagagacaataaatcaggcggtcgagggagagaaagaagataatccgctatcggctgtcgaaacgataactgtagagtcaaaagtatgagaaagtaccggatcataataagtggtggtggtacgggaggccatatcttcccggccatatctatcgctaatactttcaagaaacgttttccggatgcggaaatcttatttgtgggggcggaagaccgcatggaaatggataaggttccggcagccggttataaaatcgtaggtttaccggtgagtgggtttgatcgtgcccacttgatgaacaacgtgaaggtcatggttcgtttagcgaaaagcttgcgcttggcgaggaagacgatccgtgagttcaagccagatatagcggtcggcgtgggcggttatgccagtggaccgactttatggatggcggcttcgcaaggtgttcccgcattgatacaggagcaaaactcgtatgccggtgtgaccaataagttgttggcgaagaaagcgagcaagatttgtgtcgcttacgagggcatggagaagttctttccggcggataagatcgtgattacgggaaatccggtgcgacaggatttggaagaggcgctgagtaagaaagaggaggcgttggcgttcttcgggctttctccggagaaaaaaacgatccttgtggtaggtggtagccttggcgcacggacgattaaccggagtattcaaggggatctggataagttcttcgcctcggatgtacaggttatttggcaaaccggtaggtattattacagcgacgcttccaagcatttgaaggcgtaccggggaatgccggtttggtgctcagactttattacccgtatggattatgcttattcagcggccgatttggtgatatcccgtgcgggggctagttctatctcggaactttgcttattaggaaaaccggtggtcttggtgccttcgccgaatgtggcggaagatcatcagaccaagaatgccttggccttggtccataaggatgccgccgttatgatcgccgataaagatgcggaaaaggatttggtgcctactgccttgaagatagttcatgacgatgaacgtttgtgtacgttgagccgtaatatcgagaccttggcgcaacgccatagcgcggaccgtatcgtggatgagattgttaagattatagataagaaataaggaatatggatataaataaagtgacagcggtgtatttcgtaggtgccgggggcattggaatgagtgccttgatccgttatttcctcgctaagggaaaacgagtgggcggatacgataagaccccttccgatttaaccgaggagttgaaaaaggagggagccgatattcactatgaggataatgtagctttgatcggggaggcgttcaagtcgcccgatgatacgctggtggtttatacgccggcggtcccggagtcgcatacggaattgacctatttccgggcgcacggttttgaggtgatgaagcgggcacgtgtcttgggagagatcacgaaaagcagccggggtttatgcgtggcgggcacgcacggcaagacaacgacctcttctatgctagctcatttgctgaaacaatcgccggtggattgcaatgctttcctcggaggaatcctaaagaactacgagagtaatttgatgttgtcggatacgagcgactttaccgtgatcgaggcggatgagttcgatcgttctttccattggcttactccttatatggcagtgattacttctgcggatccggatcatctggatatttacggtacggcggaggcttaccgggagagttttgagaaatttacctccttaattcgtcccgatggttgtctactgatcaagaaaggaatcaacgtaacgccccgtttacaggagggtgtcaagaaatatacctattccgttacggaaatagcggacttttacgctgaaaatattcgtatttgcgacggaaatattacctttgacttcgttggtccggaaatccgtattcctgatgtggaattaggtgttcccgtaaaggttaatatagagaacggggtagcggctatggcgatcgcttggttgaacggagtgaaacctgaggatttgaaaaagggtatggctacatttgccggacctcgccgccgtttcgatttccatttgaagactgatcaagtggtattgatcgatgattatgcccatcatccggccgaattgcgacagagtatcttgtcggtgaaggaattatatgcgggtcgtaaggtgacaggtattttccagccgcatctatatacccgtacccgagatttcgctggagatttcgctgcgagtctctctttattggatgagttgatcttgctggatatctatccggctcgtgaggaaccgattccgggggtgagctctcggatcatttttgataaggtgacgatcccttccaagacgctgtgtaagaaggaagagcttttggacgtggttgccgccgggaaatatgaggtagtattaatggtaggcgccggcaatatcgaccgtttggtggagcctgtaaaagagattttatgtaaacaaataaggaaaccgtgatccgaataatttccatagtagtagccacgttgttgttctgttacatcgtgtttgtgtcgtttttctttcgggaaatacgtcaagactctatttgccaagatctgcaagtcgtggtgaaagacagtctggataaacacttcgtgagcgagagtgaccttgtgtctatactgaagaaagccgggctagatccgatcaagcggccaatggccgacgtgaatacggatcggatagagacggaattgcttaagaatgagatgatcgcccaagtggaggcgtataagactccttcggggattatcaaactagaggtcatgcaaaagatgcctatcctccggattatgggcgtaagaggtagttattacgtggataatctgggaaccaccatgccgatcagtcgtcggtatgctgcgcatgtgccaattgtgagtggatatgtggaaaaagagcttgcggtgaccgacttatacaaatttgcattatttttgcaagagaatgagttctggaatgaccagattgaacaaatctatgtctatccggataatgatatagaacttattccaagagtgggtaaccaccggatcatgttgggtactttggatgaattcgaagaaaagcttgcgaatttaaagcttttctatgaacaagcgatccctaaagtgggttgggaaaagtacagtatgattaatttaaaatataagaatcagattgtttgtactaaaaaatagatgatatggcatacacagactttatagcagctattgacctaggtacctcccatatggtaggaatggtggggactaagaatgcgacgggcgctctttcaatcatcgcctacgaagttgagaactccggcacctgcatacgaagaggatgtgtatataacgtgaaggagacggcgagtaagataagacgcttgatcctcaagttggagaataaactggggggggccaagatcgggcaggtatatgtgggactgggtggccagtcactccgttctatcgagcatacggtttgcaaggtgttgggaacggaaggagtggtcacagaggagatcatagactctctttatcaagagtgtaaggattatcgtccggatatgttgaccgttcttgatgtggtttctccttcctattttttagatgataaaccagagtccaacccggtgggcgtgccttgtagccgtatcgaggctcgttacaagttgattgttggacgtccttccttgaaattaaatattatcaatagcatctcggaacaagcgaagatcgagatcgccggtattctcgtgtcgcccctagcgttgggtgatgtggtcttgagcgacaatgagaaggacttgggttgcgccttgatcggcttcggtgccggcgtgacgacgataactgtctataagggtggtaagttggccagcctttccgttgttccctttggaggtaatttgataacaaaagatataaccaatctcagggttgtagagtctgaggcggaacgcttgaagatcacttatggtagcgcgaaagcggaccgggataatgatatgaccatccaagtgagtttagcggatggaatgggcttgcgtgagattaagctggccgagttgaacggtgtgatcgaggcccgtatggatgagatcttagagaatgtatatgctcgtctggaggctacaggcttgatgagcgttctcggtgctggcatcgtgattacgggtggaggcgccgctttgaagaatttaccggctgttatgagcgaacgcttgaagatggaggttcgctattcagcggttcgcaaggggattgtcgctagtggtgatttagtggttgccagcaatcccgaatatgcggtagccgtcggcctcttggcgaaaggaactaagaattgcgcgttatatattcctcctaaaccggagcctaagattgagccggtggttgagcctgaaccgacagtggaaccgactccggaacccgtcaaggagaagccgaagaaagagaagaaaaaaggtcccggcttgttcgggcggttgacaaaaggaatcgatacctttggtaaaaccctcttcgatgacgatgataacgagagtaaataacgtgatctacgaatgtaataaaaccggaagacaatggacgatacaatattaaattttaattatcctacggatactcccaaaatcattaaggtgattggtgttggaggcggtggcggaaacgctgttactcatatgtataaggagggcatacacgatgttacattcgtgttatgtaatacggataatcaagccttgaaccgttcggatgttcctatcaagttattgctgggacgtgagatcacgcagggattgggcgcaggaaataagccggaacgtgcgatgatggcggccgaggagagtctggacgatcttcgaggtatgttgaacgacggtacgaagatggtatttattaccgctggtatgggtggtggtaccggtacgggtgccgctccggttatcgctcgtatcgcgaaggatatgggaatattgacggtaggtatcgtaaccattcctttcttgttcgagggtgagcgtaagattatacaggccttgaatggtgtggaggagatcgcgaaaaacgtggatgccttattggtaatcaataacgagcgtttgcgtgagatttattcggacctttccgtgatgaacgctttcggcaaggccgatgataccttgacgatcgccgccaagagtatcgcggagatcattacgcttccgggtattatcaacctcgacttcgccgatgttaacaccacgatgaaagatggtggtgtcgctttgatgagtaatggttttggtgaaggagaaggacgtgttcgccaagcggtggaagacgctctgaattctccgctattaagcaacaacgacgtaaagaacgccaagaaaatcctgttcaacgtatatttcagcgaggaagccgagttgcgcatggaggagatgaacgacgtgcataactttatgtccgagttcaaccgtgatatagaggttatctggggtactgccgtggataatacattaggtaataaagtgaaaatgacgatcctcgctactggatttacgatggatgatattccattgatcgctgataaacgcaggaatgaagccgctcagatgacggaagaagaattgcgcttagaagaagagcgaatcgagaaagagcgtaaggagcgtgatttgattggtaaatattatggtgcttccgcacaaaaggcgggtcgttttacctctcgtgcgaaagcggtagttttgactcaggaagagttggacgatgatgccttgatcgctttgatagaggataatccgacttataaccgggatccgaagatcgtggcccgtgcccgttccaaagtagcgggagaggatattcaagtatcggctccgacaacggcgaagcaaccggctaaccaacctcgccaagattctcagcgggggggtaaacaagtgatcagtttccgatagttaataatataataaggatatggatttatttgaacaagtcagtgaagacattaaaaacgcgatgaaggcgaaagataaagtcgccttggagacattgagaaatgtaaagaaatttttcttggaagcgaaaaccgctccgggagccaatgatacgctgacggatgcggatgccttgaagatcatgcagaagttggtgaaacaagggaaagattctgctacgatttatgtgcaacagggccgtcaagacctagcggatgttgagttggagcaagtaaaagtgattgagaaatatttacctcaacaaatgtctgccgaggaattggagaaagaattgaaagctattatcgctcaagtcggtgccgctggcccgaaagatatgggtaaggtaatgggtgtagcctcaaaagcattggcaggaagagccgaaggacggatgatttccgagacggttaagcgtttacttaattaattgattcatacgaagaccgcactaagggcattctgacaattactcgttagaatgcccttggtacggttttctcgtatataccttttcctttgacaatttaattctttagaaaaccatgattacttttacatgttgtctgatagcccttatcgttggatattttacgtatggtaaatttgtcgagcgggtgtttggcgtagatccctcccgggttactcccgctttcacaaaacaagatggtgttgattatatacccttgcctacttggaagattttcatgatccaatttttgaatatagcgggtctgggacctattttcggcgctatcatgggggctaaatttggggtagcttctttcctttggatcgtattgggaagtatatttgcgggcgctacccatgatttcctatcgggaatgctttcgttgcggcatgatggagaaagtcttcctgaattgatcggacggtatctggggaacaactttaagcaatttatgcggggctttacggttatcttgatgatcttggtgggtgctgttttcgtagctgggcctgcagggttgctggctaaactgactccggaatatctagatgctacgttctggattatcgtcgtattcatttattatatactggctactctattacctgttgataagattatcggaaagatctatccattattcgccatcgctttgctatttatggccgtaggtatcttggttatgttatttattaaccagccgccgttacctgagattacggatggacttagtaatacgcatccgggaggcttgcctatttttccgatcatgtttgttagtatcgcttgtggcgctatctctggctttcatgctacccaaagtccattgatggctcgttgcatgaaaagtgagaaatacgcccgtcccgtattttacggagcgatgattaccgaaggtatcgtagccttgatctgggccgccgccgctacgtatttcttccataataacggaatggaggagaacaatgccgctgtcgtagtagacagtatcacaaaagagtggctgggcgctgtcggaggtgtattagcgatactgggtgtgatagcagctccgattacttctggcgatacggctttccgctcggctcgtctgattgtcgcagacttcctgcatatggagcaaaaaacggtggtcaaacgtctgatgatctgtattcccatgtttatcgttgcgataggaatcttattatatagtcaaaaagataaggatggcttcgatatgatctggcgttatttcgcatggagtaaccagacgttggcagtatttaccctatgggccttaaccgtatatttggtacaagcaaagaaattatatgtgataaccttgattcccgccttattcatgacggcggtatgttctacctatatttttgtagctccggaagggtttggtctttcctccggtttttctcaacttttggggttactagttacattgatcgttttcgggatcttcttagtctggaaaagaaagaaagtataaaaaaggctggcttacatttagccagccttttctgtcgttattgttcaagtgaattaaagcacttgtatgccttcctcacgggcttgttcctccccggaaggagtgattaatttataacccttgccgtggatgttgatgatctcgatacccggatcgtctttcaacaatttacgtaatttcgtgatataaacgtccatgctacgagcgttgaaatagttatcgtctacccagattgtcttcaaggcgtagttacgctcaaggatctcatttgcgtgggcgcacaacaaacttaataattcgcattccttcgtagtaagtttcgtaaccttgtctccgatagccaacgtttgtttttgggtatcgaacaagaagtttcctaacttgtagaaaggaatatctttcatcttcttacctttcacacggcgaaggatagcctcgatacgaagcaatagctcttccatgctaaacggttttgtcaagtagtcatccgcgccgatcttgaatccttccaagatgtcttccttcatagtcttggctgtaaggaagataatagggatatcaggattgatagagcgaatttcttgtgccaaggtgaaaccatctttctttggcatcatgacatccaacacacaaagatcgtatttacctttggtaaaacctttgtatccggcttctccgtcagagaataggtccgttacataccctttagcttgtaagtattctcttaaaagcattcctaaattctcatcgtcttcacaaaagaagatctttagtttttcttccataactaactttttataagaggtaaagtaataataaattttgttccaatgtttccggcaccactttcagcacggatcgtacctttgtggtcctcaataattttgcgtacgtaagcgagtccgagaccgaaccctttcacgtcatgtacgttgcctgtcggtacgcggaagaaacggtcgaatacctttttcagatattctttcttgataccgataccattatcttccacggagatcaacagctttccgttctcgttccaagtgcgtgccatcaatgtaagcggaacttccgggcggcggtatttaaccgcattgtccatcaagttgaacaatacattggtgatatgcatttcatccacatatatatccgattctgtagcttgcaggtctatatccattgtaccgccgtacttctcgacctttaaaacgaaggtgttagccacgttcgctaccaaatcattcgcgtcaatttctttcaatttaagcgctgctttctgtcgttcgaacaaagacatctgtagcactttctcgaccaagaagctcaatcgcttcgtctcgtcgttgattacgccggatatatgcttgaatacgtccggactcttcgttatatccgaatccttcaacatctgggcggcgagcgagatcgtggataccggtgtcttcaactcgtgcgtcatgttgttgataaaatcgtttttcatctcggataacttcttctgacggaatacgatgtaaatcgtgaagacgaaggttatcaacaggatcaatgagaatataaccgatggaacgatgaaagtaatagagcttgagatataatcccctttcgtcggaaaataaactctcaggtagtttagtttcgatgggggatcgttcgggaaaagcacttgggtgatcacgtcagaggcgatcggttgcttttggaattctccgctctggtatactacatttccatctttgttaataacagaaaacacaaacggcaagttcaaaccgttgttaataaattctgtttttaagtaattgttcagctttttaaaatctatacgttcctcgatcggctttagatttgcggtgtataagatgttgtaaatcacctcctctatcagtccaccttggtactggtaacgtctttttagtgtcttctgtaaatctttagatgtgtttacgatgctgttggcagactgccgttttgacaaggaagagagcggctcgaacttatgggcgctaaaactttgcatctctatttgttgaacggttccattagaatccttgatctgtaattggtatttctcatggttgatcacttgtcctaggctttgggcatccggggcattttgatacatgaaatttgtctcatcccggttgatatcatcctcgaggtatttacgggtctcatccaattccagattcttagatacttggcgcaggcttcttttgacagtctcattgaactgttcgctgcgtgtcttaagtataatgctcacatagtttacctgtaggtataataacccggcgaaggcaaaagccataactaccgcaagcaaccaaattgtcgacttcctcatatcaatatctttctcttaatattgcaacaaataacgtatgttttagtttaatatttacacaaaaaaggtaaaaataatccgtttaaaatgttaataatactttgtgggcatagaggatatatgttagctaagcattgaaactccgctgttaatgcgctagttagcgttattttatcctaagttttttatatattatcctaagtaaaaacaagtccggtgcgttttttgttgcgtacggactttataaagtctccacttaggggattaaaatcgatgtcccggaggagcgcccatcggacctcttccccgtccgcctctacccggcgttttcatgtcgctggtagtggccccacctttgaagatgctgaaccgatagatgaagtgtaccatgaaataactgcctagcgtgttatattctgagtcttgtatatagctagcggtaacggaacgggagatattgcttcgttgttgcaggatatcgtagatcttgaaacggagcgtcccttggttattctttaagaaagacttggaggctgaggcattccataggacttcgttctgtttgaatccgtccccgtagccagagttggtagaccagttcacgtcactctctatcttgaaattgaggggcagatagattgtcgtgtaaccgccggctccgtaattgaaggtgttttggttattttccttttgcagggagttgctggtggcattgtaacgaatattcccgtttacgcccagatccagataagaggagcggaagtcgataccaccacgttcggacaatatgagattccggttcgtattcttctcctcgttgatatatccgttgctattagcgaacgaggccattgtcatggagttgatggagaatttcttattcttcaagggggtattcaacatcatacggacgttgccactatagttgccatttacgtttttgtaagtggtggtctttacacctgtctcttggttataagaggtataacttacgatatcgttgatgatataactaccgtttgccatgatcataaaggcccgttgtttctccggcgtgaactgttggaaacgaataaatacgttgttcgtatagcggggattcaaatccgggttaccgatcgtgatattcgtcgggtccgagatatccgctaccggttgtaattgagtcatgctcggttggctggtacggccattatacatgatacgaagattcgtacgcttatcgaacatatagttgaattgagccatcggggagaggttgaccaccttacgggttatcttggataaggtcgtgtcgccaacgaaattctcgctgctggaataggatgggtccagattcaagccgatcgtgtagttgaactttgcccgttgagacttgaagctcaagctggcccgctggctgataaagttattgcgatagctttggctgtaggcggaatctaatacattatatataccatcagcgtcttggttgtaaacattcttcaaggcttcttgtttccgttggctgatgctataagtggcttggataaaattattatgcccgatcggttctacccacgatacgtaggcccggtaattgaaacctttgttgtcgtaacgtgagcgctggtcgataatgctattcttcaaggcatcagtctggttgaaataaacgatgtcggaacggttcatgccgtcactgtacgaatcgctattgcctccagaaagggtggcgctgaacacacgtcctttgttattcagcttacggctgaaatcgatgctggcatttaggttgtacccgttactttccgagtaattactggatttgttggtattgaccgtatcccgttcgttatccaaggtggtagcatcactgaaattgtcgttcatgctgtggctgaagctgaaactcgggcggaagataagttgagtcatcgtatccggtttccattccaagcgaaagtctacgccaaagttatcgctcttcgtacggctcatcgcctcgctattatcataggaggaactatctccgggaaggatattctgccgatcactcttgctgcgagcgtcattgtcggaatgggaataacgagtatttcccccaagagttagtttatccggcttgaattccttgctgaagttcaaacctgcgtttccggaagaggtgataccgctacccgctccgaaacctcctcgtcggcctccaccgcctcccataccggagaacattgttgaggctagatcggaaaagcccatattattcgtgttattcgctccccccatgaacgtgatctggtcattattcacgaaacgattgaccatggcgttgccttcataccgatctttacttccgtatccgccatatgcgttgccaaaccaaccttgcttcatgccgggtttcacggttaggttgatgacggtctcttcctctccatcgtcgaagccggtcatttgggccatatcgcttttcttatcaagtacctgtaatttatcgatcatcttggctggaagattcttggaggccactttcgggtcatcggagaagaactcctttccgtctaccattacctttttcacctcttttccattgacggtgatcttgccttcgctatctacctccacaccgggcatctttttcaataaatcctccaaaacggagccttcggttactttataagaatccgcgttgtattccacagtgtcgttgcgaacggtaacctcgggtgccttacctataactacggcttctcccaactcgatcgctccgtcgcttaattcaagtttacctacgtttacgggatttttctttccggtgatttgcaagggttggtacaatggatcgtatccgatgaatgtgatgtgtagtaaataacttcctttctttacgtttttcaaggtaaaactaccattacgggcgctcaccacacctcgtaccatggcactgtcttttacgttcagcaatcgtaccgttgcttgctcgatgggggtatcactaccttgctcaacgacagatccggtaacattaacaccgctttgctgtgcgaaagccatcggtgaaaaaaggatcatcaacaacatcaaaaggcactttcccgatttcataactatatggattacattgtttacaattacgaaaagatagacatggttcattcaaaatagtttaatataacttttatggatttgatattattaacaatcgtgcaggcctttggatttatggagagtattcttagaacaagaacattataaaaggtaaatagtccttcaacttaactcgcaatattttcaaggattgtgtaatccggtattccacggtttttatagaaacccccaaggcctctgcgatttggggattagattgttctccgaatcggctaagtttaaatgtctcccggtaattctcaggcaattcttcgattgctttcgtgatattctctgtaagctcgtttacgaaataggtatcaggattctcaaattgatctttaatcttatcataaatcaggctatgtactcgctcatgatacaattgccttttgatcgcattgaggcaacgatgcttaacagccataaaaagataggatttcaaggatatctctacaaataaggaatttcggttttcccatataaataacattagctcctgaataagttcttcggcatcctcatcagaaacatattgggaagcatattcgcatagtggcgaataaaatttgataaacatctgtttaaaagcgtctttacttcctaattgtatttgttcaattaaagtagaatcatccatagcaccttcttcatcctttcttttctgtaagcaaagatatattttatcttggatattcaaggttaaaattagggtaaccacatcgaaatatcacttttagggcacccttatcacaagatatacttactttaccgatgaagtactacttactttactgatgaagtatatatcctatgggaaagtaagtagtaaaagtctaacggtcttccgtaaaaaaattgatgcggttaccctgggctaaaaatgagaaagttgaaaaaaattgctttttagttaagggtgtgttctttcaggattgtcttagttatagaaacagataagaatgaaaactgaaaatagacatattaatttccaagagccggaaggtatgatgcttttacggtatataaaggacacagcttccaatgaggaaaaatcttatattgaagcttggctggaagcggatgaaaataatcagagaatcttattacagaccgcccgtatatattatgcgaataatgcgatggaacggatcgctagccgaaatccattgattgcctacgaaaagttggaacaacgattagcaaaacggacccgtttatattggctgaagaggttctctgtcgctgcggcttgtataattgctatcattgggctatcaagcttaatctcatatataagggtaggttcgagtgccggtgctcctcagcatataacgcttgaagccaatgcggggatacgtactcattttaatttaccagatggcacagtcgtgtatttaaattcaggaagtagcctgtcctatccaatgccatacgattccaaagagagaaaagtatgtttatcgggagaagcttattttaaagttactcataacgaaaaacagccttttattgttagtgctttcggtgatcgatataacgtgagggtattggggacagaatttaatatgcaagcatatgcgagtgaagaccaaatatcgacaactttagtaaaaggttcagtgaatgtagaagtgaaaaataagatagggaaaatttataaatgggaattaaaaccttcagagaaagctgtttgtgatatagatgaaggaaaggtcttaataacgaaagtaaatacgatttatgagacagcttggatggaagggaaacttatgtttaagaatatgcctctacctcaggtactaaagagattatcttatttttataatgtcaaatttgaaatacaagatccagtgattaatagctattactttaatggaacatttgagaataaacaattatctcaagttttggattatttgaagatttcttcacggatagactatgagatcaaacaagctatgacggatgacagccaaggttcccaaagtacaatggttatattgagaaagaaaaaaggaaatgagtgaaattaaaatagaagtttaaccttaaatgtattgcttatgagagaatagaaccttcaaactctattaaaaacatacggagagatgttaccagcatctttccgtatgaaatcatcaatagtaagtctttaaacagtactaaagaatttatttttttaatcttaaatcagttacaaaagtatggtaaaaaattattattaccaacagggaaggcatattcctaccctagggttggttcccaaagtcgcaagaaccatgaagttaacctgtttgttgctttgtttatctattggatttgtatttgccaatcagtcacaagcccaaagaaatgtattatctctagatctatcagagactactgtttctgatgttttggaaactttggagaagcaaaccgattttcatttcttttataatagtaaactagttgatgtcaatcgtaggatatcggtgaatgttaaaggacaagatcttttttctgtcctaaatcaaatctttaaagatacaaatattctttacaaggtggtcgataaagacgttatacttacagttgcggactccaagagtaaagctcaagatggtcgtaaggtgacaggtaaagtaacggatagcagaggtgaagctataatcggtgtgaacgttattgaaaagggaactacaaatgggacgattacagatattggcggaaactatagtattgatgttccttctggagctgtattggtgttttcatatatcgggtatgtctctaaagatgtattagtagggaataattctgttgtgaacgctacgttgtctgaggatatgcaatcgttggatgaagtggttgtcgtgagctatggtacacaaaagaagagagacttgactggatctgtttctaaggtcaatgcggacgagttatcaagtataccggtagggcagcttgggcaaaaattacaagggcaggttgcaggtgtgcagatcaatcaagtttcaggaatgccgggtcaaggtatggcattccgtattcgtggggctgcctctataaatggaggtaatgaaccattgtttgtggtggatggactaccgatatcaaccgggttaaataatatcaatccggatgaaatagaatctttctctatattgaaagatgctgcggcaacttctctgtatggttcgagagccgcaaatggagttgtcttgattaccacgaaacgaggaaaacaaggtcggacggaagtgagcttaaatgcttcgtatggaatacaatcgatccggggattaaaagaaccagatgtaatgaacgcacgtgagttcgctcaattccaaaaagaattttatgaggacaaggctaaatatgaaggctatacggaaggtgtcccagaggcttatcaacatccagagcaatatggagaaggaacgaactggtataaagaattaactcattcggctcctgttcaaaattatagcttaagtatttcggcaagtaaggataaattcaattctgcgattgtcttaggttacttccgtcaagatggtgttttgtataatactaattttgagcgtttctctcttcgtgcgaataatgattatcaagtgaatgaccgtttgaaattaggcttgaatatagctccgacattacaattggcaaaaaatcaaacgattgacgggcaacgtaatttgctgagtgcagctacattagcttctccattgttaagtccttatgatgcaaatggagattatgttttggctttgaatgcacctaatatgtttccacaaccaaactggcgaagggtattagatgaaaagattgatcagaggaaaacgataacggttttgagcaatatgtttgcggagctggatatttggaatggcatcaagtataaatttcaagctggagtagatattggatcgaataatttacgtgactttactccatccactgcaggaggcgcttttaatattgccccccctcagaaggcaacggctaattttaatacgggcttctattataactggacggttgaaaacatgttgatgtataataagacaattaaagatcatagtatagatgctttgattggctatactgcacaaaaatatacgtgggaaggttcagatttgtcaggaacagattttccagatgatgatatctcttggattgatgccgcagctactaaaaatggaactagtacgatgcaacaatgggcgatggcttctttcattggaagggctaactatagctttaaggatagatatttgttgcaagtaactttccgtcgtgatggttgttctcgttttggttcaggaaataaatatgcgaattttccttcagtctctgcgggatggattgcctctgacgaggcatttatgcagccgatgtctcaaatattgaattatttgaaggtccgtgcgagctatggtttgactggtaattataatattgataattataattatctagctcgggttgctaaggcaaattatgttttagggggagctttagctccgggtaaagcattggaaagcctgaggaataatgaattaacttgggaagagacaaaacagctggatttgggtattgatcttggtttcttgaatgatcgtatttttgtgatgtatgattattatttgaaacggacggacggaatgttgtatcaaacggatattcctgcagctacaggtttttgggatatacaatccaatatgggggatttcaagatatgggggcatgagataaccattacatctcgtaatcttgtaaatgaatttaaatggactactaatcttaatgtttctttcaacagaaataaaatcttaaaattaggtacggaaaatgctccgattggaggatatgagacttatggtgattttaatcgattagaagttggacaaccgattggtgctttgttcgggtatatttatgatggagtatacatgacggaacaagaattaaattcccaacctaaacatgctacatcggagattggaaccgctcggatggtggacgtaaataatgataaaaaaattgacgctgatgacaggacgattataggaaatcctactcctgatgctatttttggtatgactaatgaattccaatataagaattttgatttgagtatattacttcaaggtcagattggtggagatataatgaatgccaattatgaaaatacggaaaatctagatggtgtgttcaatgtccgtaaatatgtacaagacagatggcgttcaccggagaatccgggcaatggtattgttccgcgtacaaaatcagggactacagagttattccgtttggggcatagtggacaagtgtatgacgcttcatatttggcgatcaaaaatgttactttggggtatacgattccatttactcctaatcattatatatcgaaacttcgtgtgtatttgactgcccaacaacttgccgtttttacgaaatatccgggtcttagcccagaagttagtcaaaatggaatggattggagaggattaggcgtagatcgtacggcttatccagttcctagaacatttagtattgggtgtaatataactttttaagaatctgtataaaataaatgaattatgaagaagttaataagtatatgtataactactttgttattaagctcttgttctggtgattttttagatttggcacctcagcatacaggtagtgaatctacttttttcaagacagaagagcattttacgcaagccattaatggagcatatcaaagattacgtgatgttcatggcgtttatgggacattaatgtccgaaatgcgtgccgataatactcattatatccgctttgaggcggatagggcacaacgtcaatatgaggaagtggcagattttacaaatgatgagcagaatattgtaactgatgatatgtattataactgtttttctggcatttctagggtaaactctatattggatcgtatcgagggaatggaattttcagaagaatttaaaaatcatataatagggcaagcgaagtttttgagagggtattactattttcaattagttcagtattttggaggagttcctttatatttacatgaggtaatcggtgttaatgatgcgtttttggctcgttcttctgaggaggaggtttacaagataattttgagtgatgtaaatgatgccgttgctaaacttcctgttgttagttttccacaaaatggttctgctacacaaggttctgcacgtatgctattggcctatgtcttgatgacaatgccctctcgggattatgttggagcagaggctcaattaagggaaatactgaagatgggatatgaattacaaacaaattatgcgtcagtctttgaaccctcgaataagaatagcaaggaatctatttttgaagttcagtttcaacagggggatcaaggacaggaaagcaactggttgtattattttataccgagaacaagtgaggctgagattataacaggcgttcccgcaagtaatacacttagcgatgctggctggaatatacccacacaggagatggtcgattcttatgaagagggggacttgcgtgtagatccttcggtttctgtaatagcaggacataatgatgagtatggacgttttgtatatgacctcaaatccgcaactacgcgcctaatatgatacagaagcgaaaagaatctgcatcgttagtaaaaagggggcacagtgcatcgaatgtcaccataaagacatataaatgccccttaccccaccatgcgacttgaggcaatacgcaaaatcacgactataagttgtcggtgttatccaaagtcattctggaacacattggcataagcattgttgcatgaatagatattcagcacatacttccttgatgtcctgacccatttggctggcacagagatgaacttaaagacaaacgtcttgatgcggcttgttgctttgagtccgaacctcttcacgtcaagcctcgccatgatgaatttatagaagttgcgtatgagtgccataagcagaagaaacaccgtgttttctcccataaaggattttggaagcctgttccagccgaatccgttattcatatcatcgaagatgcgttccttccctccacggaggttatagaattcgacaatctctttctcggaagactcgtagtcatttgtaaggatgcagcggtaggtgtattctccttcccacaggtcgagttcgccgtctatccgcttctgtctttgaatcacaagacggtatgccttccctttccatttctcgatgagaatggaggccagctcaaactcaatgccgcccaattccactttcttccaacctctgagggcaaagatgtcattgtagagcgaactgcatcggttagcacggatatagaaggtcttgcagtgtttagcaatctcttccactatctcttcagaacacgagccgcaatcagctctgaaacggttgataataagcttgttttgttcaaacctttcaaagaacctcttcagcgtgtccttctggtggaaacggacatttgtgttgccgtcgctgttctcaatgccgacaatcaagttgccaataaccgccacgccagggcgataaccaaggaacttcttgtatgtaggcttcgcatcaaacttctcagcctctatgaactggtggtcgaagtcaacgtcatacccctcgccctctttcagctgccctgtggacaataggcaattgaggagcagtgtattcagcttgtctgccgtgttgaagtcgtaggtcttgccagtgtcggatgtgtaggaaatgttatcctgggtcagttcctttatggctctaagaatcgtgtcggcactgcatgtgcgaagtgtcggatgaagcgaaaggtggtacatcagatgagtggtgacatcctcgatgcatgagccgccacaaaaataaacgctcataagcgaacggatgatttcgctgtattgataaccatacagcctgcatctcataccgagggttgagtcgattacagatgagagtctggagtcaaattgctccattattgaaaatattcctccaaaaggagtgagtttctcggatttaattgctacctttgccatgtctgtcgggtttgatacatattttgatttgcaacactaagataggtgaaaaatctgacatggcaaattcctgagcaactttttgttgctcaggtacttaaaaagttatatttgtaatagtgttgcggaattaaggtatgataaagtttttaatgtaggggatcttggaattaaggactatcctatatcttattattttatcaacaaatatcatcatgctcattcaaaggtgaaaaatacggatgataattggcctgtttatcggtattcggatgctcttcttttactagcggaatgtttggtagaacaaggtaaggcgggagaagctgtaacattcgtaaatcaagttcgccaacgagcaggattaaaggctttgtctatggtaaatgctgatattgtcgcgaaagagcgtcggcatgaattagcttttgaaggtcatagatggcaggatttactccgtacaggaaaggctatagaagtaatgtctgaatatggaaaacgtatgaagtctttatatccgtatttaacagaaagaacttatcaggtaacaaaagaaaaattagtgttcccgataccttatcgtgaacttcaaattaattctttgcttgagcaaaacacgggatattgattagtgaaaaatgaatttgttccggagacactttgttctccggaacgaatagaaatactatctttaccattatttgttaactgaaaggtctctaggggctactaattatttaaagtttatgaaacaacgacttttcttactgttctgtttaccatttcttatgccttccataaattttgcacaatctcaaaagtataagggatatccaagacggggaggagatattgatgtcttatccggctttcagaatccccctaaaggatatgggaatgttcctttctattggtggaatggagaccgtttggataaagagcggttaaaagaacaattggatatcctttcttcttctgcgacagacggctttgcggttagttatatacatacagatccgaaagtggataccttgttcaataaagacgggtatggcctatatggacggactgagcccggtgaacctgctgtattttcagatgagtggtggaatatctggaaatggttttcgggagaatgcgctcaacgtggattagggattggactagatgattatacagttggctggattggaaacggctattatccggatgaattggatactatggatatctttaaaggatataaaggagagttggagataaatgcaattcctgtaaaaaaggatgaggttttccaatatgatgttccggcggatttagtggctgttgtcgcttggcccggtaagattaatctcgaaactagcattaagaatgggcagattatttggaaatctcctataagagaggatgtgaatgtctatgttattaaggcaaagaataaatatgtccttcatccggattatgggaagactttggttgatgtctattttaatcgttttgaaaataagatggactctgtgggaaaggctggcatgaattatttttttcaggatgaattatcatatccaatcagtatgatgtcttggtctgatgattttcagtcggagtttcaaaaacgaaaaggatatgacataaccccgtatctacccgcattgaaagaatatataggcccgattactcccaagattcgattagattatgcagaggttttaatggatttgtctgaagaacgttattaccaaccaatttatgaatggcatgctaagagagggctaatatatggctgcgataatttaggacgtggacgaaatccattatcttatgttgattatttccgtgcgatcagttggtttactgctccgggaaatgatgctccatctatgggttccagctttttggagacgaaagtttcgagttctatagcgcatttatataatcgtccaagaacttggctagaagcttttcatagtatgggttgggggagctccggtgcatggttgactcaacaaatagatcatcattttatggctggtggtaatttagtttgtatgcatggtttgtattattcaactcatggtggttggtgggaatgggctccgccttgtttccattttcgtatgccttattggcctcatatgaaaacttggttgaaatatacggaaagaatgagttatctgttgagccaaggagagcatgtttgtgatatagccctcatgtatccgactgaatccatgcaagcatatccagatatgacagccgatacaacatttaatttggctatgaagttaagtgctgctggattggattatgactttattgattttcgttctttaaggcaagcctcttttgacaaaagttcgttgcatataatgaatgagaagtataaagtaatggttatagcaggaatgaaagcgatgcatttttcttctttgcaaaaacttagggattattacagggctggtggcattattctggcaacaggggagttaccctctgctagtagtagagaaggtgaacaagataaggaggtcgacgaaatagtaaaagagatattcggtttgactgcgatggaggctcgttcaggtaaaacggggcaaatgcaaaggaatgtggcaaatggaattgggtggtatatttcagatggttcgattgagaaatgtatccctcaattgattacaccagattttattcctaatgaaaatggaggtaaagtgttgcatcgaaaagttggtgatcgagatatttatatggtaatgaatgtggataagaactctgagtgttttttccgtaatacaggcaaagtggaattatgggatgctcaaaatgggacgatacacccttatcctgttcttcgccagaatgaaaaaggtacttggttgaaattgaaaaaagaatataccaattcttatttaattgtattctcaccgggcacacccattctagaaaatattttggaaaagaaagaatcccttgactctgaaattttgttagatggagaatggactgtcaatttgcagccgacattaaataataaatggggcgattttcgtctacccgcatccaatgaatatattggagctgaagctcgtgtttttcgttttatggcagagaaccaagctcctaagtcttggatggaaaaagattttaaggatgaggattgggaagaaggaatttatggatatggacctcaatatgagacttattcggattcatttcccaattggaaaaccgtttcgttttcttggcagtatggagtatgggataatccgggtgctcaaggatatcatgggctgaaaggtaagattagtgatggcttctttattttggatagaggaggattgcaaaggtttaggacttatgtgtatgtaaaggagagtggaacttatcgggtggagcagattgggacattagcggatgttgttttaatagacggtgtatttacccatgaaaaaatagaattgacgcagggatggcattctttgctcgttgagtatgcgaatacttgtaaaatagaatataaatctcaaactggagcttaccatgatgatcgtcctcgaggagccgtagttctgttaccagagaaagtagcaaaaccaataaaaccatctgcttattcggatgaaatatcgatgtgttgggctaaaacggaacatttgttttttgatccgtaccaaggaaagtataatagatggaattaccgctttcaatcagttccgggattacaggaaatggattttgcgattaggggtaaagacttgaaagtgtgggttgatggaaaggcgcttccggattctgctatacatcttctgaatgagatgagtctggatggtattaaccgatacaaggtgatttttccggagaaaaggcaaagaataggaactatcgctttttcaatcgcagctcatataggtaatcaagggacagcagcattggcagaacctgtaaaattgaaaacaggaacaggtctgcttttgagaggaaattgggcaaaaacgggagctctacgttgctattctggaggtatgatttataaacaaaatgttcgtttaccaaagaaatgctcagataaaaaagttttattggatttaggggacgtggtagctacttgtgagataaaggttaatggccattctgctgggattttaatgagtcctccatacaaagtggagataagccaattcctaaaggaaagtgcaaatgaaattgaggtgttggtttatagtacattagctaatcattatcaaactcagccaacgccctatcgtggagaccctaaagccggacttataggcccgatatctttgttgatttttaattaattaaaaaggattgtacaatgaaatattttatattattactgattttgctatgttgttcggtatttgtgaaaggacaaaatcaatatagtgcggaaccatctcctgtattgttaaaagaacgttgggaagcagaatggattacttgtccggaaagttcattatatgattacggcgtttatcactttaggaaaacattgacattagatagtcaactagattcttttattataaatatatcggctgataatagatatcgtttatttgtaaatgggaaaccggtttgttggggaccggcaaggggggatatttatcactggtattttgatacggtagatattgcgtcgttgttaagacccgggaaaaatgtattagctgtgttggtttggaactttggaagctatactccgggagcacagatgactctgaagacaggtttgattgtacaaggaaactcttctttggaggtacaagcaaacacggataaatcttggaaagtttatcatgatcctgcttattctccttctatagagtatttacaagatgttggatgcagtgatattttgaatgcgtcattatatccatggggctgggaaaatttggattataatgataccgactggatagaggttcgtacgataggccgtggacaaccttatggaataggttctggatatgattggatactatgcaaaagagatattccatttatggaagaatctttattacgtatgaaccgaatacgtagggcggaaggtattgatttgccatctgatttcttaaaaggtaaagcggagcttaaagtcccagcaaatcagaagatatctcttttgattgatcaggattttttgacaacggcttatcctgaattgattgtttcgggggggaagaatagtctagtgaagtttacttatagtgaagccatgtttaaggacggagaaaaagcgaacagaaatgagattgatggacgggatgtcatagggtttgtggataaattttatccggatggaggctcgaatcgtcttttccgtcctttatggtttaggacttatcggtatattaaactggatatcgagactaaggatgagcctttagttctccatgatttgtatggtatgtatacaggatatccatttaaagaaaatgcttcttttgattgcgatctggattttatgaaacaaatttgggaaactggttggcgtacggcacgtttatgtgcgcacgaaacttattttgattgcccatattatgagcagttacaatatgtgggcgatacacgtattcaagctcttatttctctttacgtagatggggatgatcgtttaatgcgaaaagcaattaagatgtacgattattctcgttcttacgagggaattacgacaagtcgttatccgagccgtgttcctcaatatattccaccattctctttatactggattaatatggtacatgattattggatgtatcgtgatgatcctgcttttgtgagaaactgtatttcaggggtgaaaacaatactggagtggtttgcggataaagtggataaggaaactgggatgctaggggctattcctcattggaattttgtggattggccaactcaatggccatggagcaaagataaaccgacaggtggagttcctccgggaggaatgactggcgggtcctctatccttactttgcagttagcttatacattaaaggatgccgtggaattactggatcattttggtgagaaagatttggccgctcaatatgactcattacggatttctttatgtgaaaatacatggaagcattgctgggttgaaaaaaaacaattgttatgtgatgatatattgaaaacaagttatagccaacatgctaacataatggggatattgtctgatgctattcctgttaaacttcagcaagacttattgacacgcttagatacgacttcttctttaattcaggcaactttctattatcgtttttatttgtttcgggctttaaagaaagtgggcttagctgatcaatatgtatctatgttgaaaccttggcaagatatgttgggtatgggattaaccacttttgcggagaatccggagcctagccgttcggattgccatgcttggagcgcaagtcccgttttggattttctagcgacaatttgtggagtggagccggcagaagcaggtttccgttctgtaaaaatagagccccatttaggttgtttgaatagagtagagggaaaaatacctcatccattaggaaatatttctataatattagaaagggaaaataaaggcattaatggtaaaattgtattgccggagggtttgtctggtcgtttcatctggaataaacaaaccctagttcttcattctggacaaaatctgatagatctatgaatatgaaaattaattatttgataatattaggattgttctgtatacaagatatgatgggacagtcagattttggattggcacctattctgcgaatagatgataatacacttatggagaagtttaaatccccaccgggggaagctcggatgtcttgttattggtggtggataaatagtatggcgaccaaagagtctataacaagagatcttgaagaaatgaaagctaagggatatggttccgctacattaattgatgcgggaagctctagttacgagatcgctacgaaaacagcacatggaccagtatttatgtctcctgattggatgggtttatataaacatgcggtacgagaggctgatcgactggggataagtttgtgtgtcaatgtacaaagtggttggaatccgggaggaccttccataaccccggaacatgcattgaaaaagttaacatattctgagtgtaatattagtggtggaaagatacttcatataaaattagcacttccagaatcaaatcttttgtatcgtgatgtctgtgttcaagcagtgaaacagttgccagaaggcacaccgataaaggatgaggcaattccttattggtctgctaaatcatttaactcagtgcttggttttcaagaaatatttccgctagataaattgagggagggattcctttttgactcaaatgcagaagtgataaagaaaagtgagattctggatttgacagatttttttgatggagaaactctaaattgggatgctccagaaggtaattggactattatacggtatggctggacttgtacgggggtgcgtacttcgacaacaagtgatgggtgggaaggtctatcggtagatcacttaagtgcggaagcttttgatgtattcagtaaaactgtcatagaaccattgatttatacggcgaaagaggccggtaatagtgttcgttttcttcaaacggatagctgggagatgggagtcgtgaattggacaaatcgtttccccgaagaatttaagaaatatcgaggatatgatatatttccttatcttccggttatgactggtcgcattgtagagagtccagaactttcaaatcgttttttacaagaccttcgaagaactgtgagtgattgtatctatgagaatcattatatgttattcaaagagttggctcataaacatggaatgatgattgacccggaatcgggaggcccttgttatactcctgttgatgcgttacagataatgagtattagcgatatacctcatggtgaatattgggcacgatctatttctcatgttgcgtctgagggagcgagactatcagttagacaaagtgcttgtgtagcacatacgaatggaaagagatttgtggaagctgaaggaccaacgagtattggcccccaatgggaacgatcccctaaagatttaaagggaattctagatcgaattttttgttcaggggttaatcgtttagtttggcatgcgtttgtttcctctccaaaagagtatggcgtgcccggaaatgaatattttgcgggaacacatttaaatccaaatgtaacttggtgggagcaggctggagattttgtagattatatagatcggtgttcttatttgcttcaacaaggattatttgtggcagatgttctttattatacaggagatgatgtccctaatatggtttttctgaaagaggaggtagacgatctaaattttgggtatgactgggataaatgctcaaaagatgtgattttaaataggctttctttttctgaagggaaaatacgtttgccggatggaatgtcgtatcaagtattaatattacctcctcacaagacaattgatttggaagtcttaagaaaaatagaacagttggtattacaaggtatgactgtgattggtgagcctcctcttagaacgagtggcctaaccaattatccggagggtgataaagagttgtatgaaattcggaatcgtatgtggggatggctagatggagtaaatagaacggaacaaacctatggtaaagggcgtgtaatttgggggcaagatataaataatgtgctaatgtctatgtcggtgaagcctgatttatcatatacaagccgtcgatcgggaacgttattggattatattcatcgaagaacagaggaacaagatatttattttgtaacaaatcggtatgctgtaaatggcattaatgattatttctatcggtatatgccttctttaccagatcgttatgaatttgtgaattgcaaatttagggtaacaggaaaggttcctgaattatggaatccacaaacaggagacataaggcctgttttaaattattatgaagagaacggaactacggttattcctttgcattttaatccagaaggctctatttttgtagtatttaggaatgcagagaagacgaataatcatatcgtgaaagtggagcgttgtagttctgcaatattcccagatgatttagaggctggccaatatcctccaattgaatttgaaacccaaaaagataatattgtcgctaacatatatgatcccgggaattataaaatttattggaataatggaagtgttttatctataggaagcagtgagaaaatagaggagtatgtcataatggggaattgggttgtacgctttgattcttgttggggtaaaagtgaacctgtcattttcaataaattatattcatggacagattcagaagatccggagatccgttatttttcaggaaaagcgatttatgaaaatacattttatataaagactgaacagttaagggataaaaagatgaaattagacttagggaatgttcaagatctagctgtgattaaagttaatgatcatgtcttccctgtttcttggtcggctccttttgaggttgatatcactccttatgtaaaggaaggtcaaaatactttatcaatagagattgtcaacttatggcctaatcgccttatcggagatagtaaattgcctaaacaagagagaagaactaaaacgaatatcgtaaagttcgatgctccagattctgaaaaatatttacgaacgtcagggcttttgggaccggtaaaaatcaggtccttcaagcaagtgaaaattgaagatttatagatcaatgaaaaatgaggctaagcaccatttgtagtagatagaggttatttcttttcaagaggaaataacctcttcttatttttttattttatatttgttcggtcaatatgtgctagaggagatggatgtagaacggatatacctagaacgattacgaagcggttcatacagagactttacgaaactgtatgaatcatacgcttcacgcctatatgcgttcgcattgcacttgactcattctgatgctcttgcaaaagatattgtacaagagacttttatcaaagtgtgggtgcggagagaacagattgatttagatatgtctttcagtgctttcctatttacgatggccaagaaccaattattgaatgagtttcgtaggcaggcaaatagtccactttttttggaagatgttgtactgaatgagtctggagatggagaggaaacagcgattgaacgtaaattatcttttgaggaatttaaccatagactggaaatagcgaaacaaaagttgacacctcgccaacgagaactgtttgagttaaataaggaacaaggtataactataacagaaatagcggctaaagcctttatttcagaacaatctgtgcgtaaccagttatcgcaagccttacatgttttaagaaaggagctcggtaagtatgctttgctgttctctcttttctttatcggataaataaaattgaaaaaataatattcttatgttttataacatctaaaaagacatgttataaattaacggctcatgtgtataccttataaaaaggatattatgcaggaatcacatacatattatttgctctcaaagtacatggatcatacgatctctacggaagagttgaaaacactacggcttttggttaatttgtctgatgatgatgaattatcgttgtcattgtctcatttatgggaaaatgggcgaccctttgaagaggttgatgagagaatcatacgagatatgttcagcgggattcaaaatcgaacgagaaaagaacgattcgttatggtgtttaggaaactggctcgtatcgccgcaatactattaatacctttattaagtgtattgtctggttatttatatttcaatccagtcaatcaggaggagggtattggtaatttagtggttcatgccgatagaggggaaagatcgggggtgactttaccggatggaacacaagtaaaactaaatgcggaatcgagcttaagttacactcacgatttcggtcgagagcttcgacaggttaatttagagggagaggcctattttgaggtgactcggaatgaggataaacctttcgtggtacatacaaaatatctggatatagaagtgttgggcacaagttttaatgtgtattcgtatgaacgggagaatgtcatggaaatggccttgatatcgggacggatcaagatacagacttgttcagagccttctcgtgtcgtttatctaaaaccgaatgaaaaagcattgttcaataaagaatcgggtattataaccgtggagaaaacagataatcgatttgaaacggcatggttaagaggagatctcgttttccgatcaacgacattaagtgatgtcttggctaaactagagcgtagatatggcgtgaatatccatttgaatgattcttctttagcgaatgacttatttaccggaaattttgatagtgaatatatcgtagaggtaatggaccttttagagaggcattatgactttacatatgatgtacgaggagatgatatctttatacatccttgagcgagtgaaaataaaaatgtacaaccttaaatcagttcttatgcgacaagattcttcataataaaaacggaaccgaaaaatggtcgagattttccggttccccaattaatactccatttacgagaatggcgattaggccataaaacggattgtatcaatttaaaaaaataatatatgttcaaaagtagaaaaaatcaatgtagctatataatttttttggctctatttctgttttttaatcctattttggtattagctcagacaggaagtgtcactctttccatgaagaatgctacattaaagcaattttttgaggctgtagagaagcaaaccacatatatattctcttatcgggatgctatagtggaaggaaagaaggaggtaactttaaacgtgacgaatcagccgattcagcgtttgttggatgatgtattgcatcaaagggacttgcaatatacgatgacaggccattcaattgtcgtaactttaaagactgcaggtaaagtaaagcaggtatctggtactgtggtggatagtaacggcgaaccgattatcggagcgaatgttgttgagaaagggactacgaatggaacggtaacggatatctcgggaaatttctcattaaatatagatgataccggtattttacagatctcgtatattgggtttaatactcaagatgtagcagtgaacggaaaatcaagtttaatgataaacttgaaggaagatactcaaaaactggatgaggtagtcgttgttggttatggcgtgcagaagaagtcgaatgtaacgggatctgtggcttctattaagacggatgattttaatgatttaaatatggatgtgtcgcatgttattcaaggacgtgtggctggtgtcaatgtttccaatgggaacattatcattcgtggagcggcttctatcaatggcgcggatccgttgtggatcgtggatggagtgccgggtagcgctcctaattttaatgatatagaatctatcgagatcttgaaggatgcggcttctactgctatttatggtgcccggggagcaggtggtgtgatccttgttaccactaaaaaaggaaagatagggaaactttctattaatgcgagagtaaactttggaatagagactccgatcgatttgccggatatgctgcataccgcagactttattgaccggaaactggcggcaggcttccctaataatcccaattccggctgggataatcccgcttcgctaccagatacagactgggaagatctggtttggcgtaatgcttttaggcaaaactattttttacagatgacaggtggtaatgagaaaactacatttaatatgtctgcggagttctacaagaatcagtttatcgaacgttattcatttgaggatgcgggtaattttcgtgtggctagccagacaaatataagtaaacgtgtgaaattttccgagatcctgactgttggttttaataatacggatccccatttgtatgggcagacgaataatgattatgtttattaccgccaagttcctacgatggtgccttatgataataccaacgaagctggtggaggttgggggaaacatccggcaggtggttactacgagggacctaatcatgtggctacactaatgtcgcatcatgcgaatgaacgtaggttttgggcccgggcaaatgcgattttggattgggagattatcaatgatttaaaattccaagcgaatttctctgccaattttgactcccatgcgaataatttgttcttagaatcatggaatttgggatctttgtctcaacaggattattactcgaaagattatggctccggttatgatttacgtatgttatatacattgacttatgatcatacttttggggagaaacactatgtaaaagggatggttggctacgaggcttatcgggcgacggcttcttcggcaggtggttggaaaaacggcttcttggttcagccttcggatgatattagtttaggtacgggagataaagatgtatccggaacgaaaacggaaggtcgtagtttatcccagttcgctcgtgtaaactatgcttatgatgacaggtatttgctagaggctagtattcgtcgggatggttatgataactttggtccagagaatcggtttggtgtgtttccttcggcttctgttggttggaatgtgggaaaagagagctttgtaaaggataatataacatggatgtctcaattgaaattgagaggaagttatggtaaaattggtaacaatacaattcctcaattcttgtatgaaccttcttttacgaataattatctatattattcatatgatgggcaaaatacgcagagaggattctggtattcaaatgttgcgaatgctacgattaaatgggaagacgtggcccaatggaatataggtgttgacgcaagttttctggataatcgcttgaatacgacaatcgagtattatgataagaaaacttccgatatgctgtattcagtaggtgtgccaccttctgccgggccttcttcggaaccatttagcgagacttcttcttatcgggctaatatcggaaagataagcaatagaggtttcgaatggatggttcaatggagggattcctataaagatttcaggtatgacgtggcttttacgttgtctaccaacaagaacaaagtggtaaagttaagtgaccaagtgaatccgatcatttgggctggaagcgatgcggctttgaatagttctatttatcgtacggaaaatgggcaaccgatgggacagatgtatggatatgtagtggatggcattattcaagaccaagcggaaatcgatgccttaaacgctcaatctccggatggattgtaccaacaagcaggtacggctccgggtgatttgaaatataaggatttaaatggagacgggaaggtgacgaatgaggataagacatatatcggtaatccttggccggatttgatgtatggattgaatataaatttgtcatggaaaggctttgatttaagtatgggctggttaggaaacgcaggtgttgatgtctttaatagcgctaagctttatgaaagaagtttctatggcgactataatacgacttataaggtatatgaggcgtggagtccgacgaaccgggctacttcacatcctcgagtaacgaaagaggacccgaatggaaacttcaagaatgtctcctcttattttgtggaggatggttctttctttaaattgaagaatttacatttcggctataatttaccgaaatcaatactttctcatttgaagatagaaggtttgaagttttatattaattgcgataatttatttattatcacaaagtttcaaggagatcctgaattgggtggtggatatttggaacgaaatatgtattctgtgaaacgggctccctccacccgcaccattatgggcggtttaagtttaaccctctaaattaataggaagatgaagaaattagttatattattagctgctgcgttaacttttaatagttgttcggatagttttctggatttatcaaatcccagtgcgttatctccaagtgtctaccctaaatctatggcggatatggagactatcgtaacttcagtttatgcgaatatggtcgctgtgcctttgtatggaaaaagggttatggcgaaagggacattctgtgtggatcatacggtagatatggcttggactggtgacgccaactggaaccagttggcgaccaatcaagtgacttctgataatgcttacattgggacgttatggattggttattataaaatgatttcttgtgcgaataccgtattggagcaattggaaagaatcgacaaggagaagtttacggatgcggatttagcaagactttcgcagatgaagggagaagctttgttttggagaggttgggcacaccaacagttagtagcgttttttggggagggatatccttgcaacggggatggcgataaaaaaggtgtacctgttcgtttacaggtagcatcgactccggatatgctaaatatagaacgtagcacggtggccgaggtttacgatcagatcttgaaagattatgaggcagccaaacttttgctacctgccgtatgggaagagcgggcggactatccacgtccaacctctgttgccgttgctagttacatcgggcaagcgaatttgtatatgggtaattatgatgcggcaaagaaagcgttgaaagaggttattgattcttccggaaaagaattgctccctttcaatgaatatgcgaagatgtttaatgaggatcaggagaaatttaatagagaatcgatcttagagattaatttccgtaatggggatacttccggatatttttggtatggagaaggttctcaatatggattgatcgctgccttatgtttccagaacgcaagtggagatgttgaggcggccggttggggtaatattttctttcatgatgcgaatattaaacgttttaatggagatcctcgtctggatatcgccgctttgcgtccgggaactcctgttattatgaatggacagcagacgcaggttctgaaatataaggatacggaggctgacattcaaggttggagcatgcgaaaatacaatccgttgaaaagtacggtgaatgagttgaatttaggggttggtattaatatgtatttgatgcgtttggcggatgtatatttgatgtatgcggaagcttgtcaggctacgggagatgaggtaaatgcccggaactatatgaatctggtaagaagaagagcttataatggagatagttcccatgatataacggctagtggagaagctttgagagatgcgattcgggaggaacgtttcatggagttctgcggtgagggcgtacaacattggcaagatgtttgccgctggaaggtcttggatgaggagattagccgttggtatggaaagacacgtgttggtaatccgcattatgatgcgaaagatttgtatttcccgatacccaaggttgaaatggagaataatccgaatatgacacaaagcataggttacgagaacgagtagatataacttgttgaaaagttcatcaaagaaaaggaataggatagttctcttgggatcgctaatcctattcttttttattcctttatgatcatattaaatcttattgaataatgaagatgatagatgtatcgaaagtaagagtctttcgggggagtctctttgtattgcttatgctctttatgcggataggttgggcctcaaatgatgatagcacctataatatcgtggattttggagctaaaggagatggaataacagacaatacccagttcatcaacaggataatagaagcttgttccttgagagggggaggaacggttatcattccggagggaacgtttttgacaggaagtattctgctgaaaagtaaagtaaacttattcttagaaagtaatgccgtagtgaaaggcataaataatctggaaaagtaccgttctatatccgatcttaatcaagatgaggcttattataaagtaaaaccccggaattggaacaaggcattgcttttaggagatcaagttgaaggtgtgtcaattacaggagagggggtaatcgatggtgcccatattcaagataaaaaaggtgaagaagggatgagaggccctcatattctctttttgtcgagatcgaaagggattaagatatcgggagttaaactacgaagagcatcgaactatgcttttatgagttatgatattgaaagggcttctttcgataatcttttagtggaggaaggatgggatgggattcatattcgtggcggaaaagatatccgtatccgaaattgccgtttttatacgggtgatgatgctgttgcgggtgggctatggaagaatatggtaatagagaattgctatatgaactcatcgtgcaatgggataaggttgataatgccggctactggtttaaagatcgttgattgtgaatttagaggtccgggaaaatatccacatcggacttccggtgaacaaaaacgtaggaatatgctttctgggatattgctccaaccgggcgcatggttccctgcgtttggggaagtaaaggatatattgatatctagctgttcttttgatcaattggataatccgtttctagtcacattgaatgaggggaaccggggagagcggatctgtctggagcatataagaggtacacgtttaatgaaagcggccgcctcggtagagagttggggagatagtagtttgaaagatgtccggctttcggatgtttccttatcgtatgttggaaacaaagatcaagaaatagtaggacgtactccctcgaagccattgaccgattatcgtgcgctcccttgctgggggctttaccttcataatttagatcgagtgattttacggaatgttcggttagattgtgagaatgggaaagttggcccagcctcttgtttcgataatgtggggtccgtggagatttataatgtaagtttttaatcttaaaaagaattagtatgcgaaaatatcttttgttttgtctagctttttgtgtattgggttgtttggctcaagatttgattgtccgtccgaacgatcctattatttataagaaagagggcggtgcctttttatggctgggggatacggcttgggagttatttcatgtattggataaggaggagatcgttcattatctggataaccggcaagaaaagggctttacggtaatacaggctgttatcttatctgaactggatggtttggataaaccgaatgcgtatggatatttgcccttggttgataaagaccctacccaaatcacggaagggtactttgagttggtggattttgtgattcgagaggccggcaaacgaggaatgtatatagggcttctacctacttgggcaaacaatgtggtagagaaagacggaaatccagcattgtttaatccagataatgcgtatacatacgggaaaatactgggaacccgatataaaaatgaagctgtaatatggattcttggtggtgatagaaatgtggttacggataaggagttcgagatctggcaatctatggcgaaaggaattcaagaaggaaatggaggaacacaactaatgtcctatcatccgacaggagagatttcctcgcattattggttccacaatgagtcttggctatcattcaatattctccaaagcggacattaccgccggatggatccggtatatcgtttttcgggtatgtatgctcaattgaacccgattaaaccgtttgtaaatgcggaaccttcatacgaggacataccggttcgtttctgggaatattttgattatgctaagttcgggaagaaaaaggaggacataataggtgataacggattgattaaggatacgacttattttacggatggaatttacgatgactatgatattcgtatgcaggcttattggacttatttctctggagctgccggatatacatatgggaataacgctatttggcaaatgtataagccgggtggtaaatatcatgtaccatgccttacgttttgggatggtgcgttggataggccgggagccgaatgtatgcgctatgtaaagtctttgtttacgatgtatccgttagatcgtttccgtccggatctatccgtcctgttcggaattaattacaatgacgcaagctatatcactcccgttttagcaaaagataagacttttattttagtttatttgagtcaagggcaggatgtaagaatacaaatgagtaaattgcgatctttaggtaaagcttattggttcaatccgaggaatggggcgagaaccttgatcggaccggtcgagaataagggaattcgtacattcaatgcgcccggagaagcgggagagaggggaaatgattggatcttaattttggaggcggatgataggtagacgatgtataaattttaaataataaaagtcattatgaagaagatcaatgttttgctgttagcctttttgctgttaagtttttgggcgaatgcccagcagtatccttttaacgggttggatatgaatatgggaaacctttctcgtttgtcgaatgcgcagagtcgttcgatcagtccggagaattttacgggggagaaagggaaaggagcgatggctgatcccgtgagagataaggatgtccggaataaggcgaatgcggccggcccagcgaaagatttggggaaaggctggaaagtaaatccttttattatcgtgaaaccgggggagacagttaccatcgcggagattgatggcccgggggctatccagcagatatggatgactcccactggcaactggcgattctcgatactccgtatgtattgggacgacgagaaagagccttcggttgaatgtccggtcggggatttcttcgccagtgcttttaatgagtatgcccaactatcttcgttagcggtctgtgtaaaccccgggagcgctttcaattgctactggaagatgccgttccgtaagaaagcacgcataacattggagaatattaacaatgcggaagagatgcgtttgtattaccaaattaattataccttgacggaagtgccggaggatgagggatatttccatgcacagttccgtcgttccaacccgacacaaggctctagccatacgttggtggatggaatcaagggaaagggacaatatgtcggaacttatttggcttggcgtgtcaatgataactgttggtggggtgaaggagagatcaagttctatatggatggcgacaaggaatacccgacaatctgtggaacaggtacggaggattatttctgcggttcgtataacttcgagaatcagaaaacacatcagtaccaagaattcaccactccttatgcgggaatgcaccaagtgatccgtccggatggcctatatcgggctgttacggcgttcggcttgtatcgctggcatatcttggacccggttcgttttgaaaaggatctgaaggttacgattcaagatttgggttggcggcacgacggtaggtataataaccagaagtcggatatctcatcgactactttctggtatcaggcggaaccacacgctaaattcccggcattacccagtaaggatgatttggagattccgagatggtaaatggcctgtggtaagatgttaaatgttatttccgattaaacctttcctttttatcgatgtctattctttcgaagcgcttcataaacaggtaatttataataaaagtaataagtagtagtttatgaaaaaggtaataggattgtgtttggttgtattgttgagttcaacttctgtgttcgctcgtgagaacaggcgtatggacaagcgtaagatggatccgtccgcgcgttgcgagaagatgatcgccgacttgaagctggatgagaaacaagcggtggagttccgtaaacttcaaaaagagtatatggaaaaggctcaaaaagaacgtgaggcgatgaaggctgagcgtgagaagcaacgggaaaagatgttggccatgcgtgaggataagaacgcccagatgaaaaaaatattgacggaggaacaatacaaacaatatctggaaaaacagcagcctaaagggaataaacatggcagaaaacatctaggtaacggacgtagataaagaagtctatagatagataaaatggccggggtagcgattatcccggccattttagttctaatcggctgcttcaaccacataccaagtatatccgttggcagggattttaaccgtaagctccaccgtatagtcccggttcagtttgtaggtgacaggcttttgctctttttcccggatgcgggctgtttgtgtcaggccggtataatagagtggaatatggatcgtacgggtgatctcttgatgggtcggattgaagaacatggctagacctttctccttcttgtgaggattgacgtgtatgaacccgtcccagtctcgtgcgtccggccggcgtaagtggatcatatcgctgttgagtatatcgcggtatttcttataccattgaataacctcggttacggccgcttgggtttccggggtatcatataggcgtggccctcgatagcaagcttggacaccagctccgtaattttgcatcatatgtgttttgtattcgaacaagtgttcgtggaggggctccaaggtggcggcctctcctcctccttgatactccacgagaggaacgaagctccagcatgccgaagccatccgatcccatgtaccatcataattcaattggcgggcatggatgatctgccggtcccggggaagcgaccagttggcttcacggtaaccaatgcctgtcttggtagacccgttcaagaaatagaaatcgggaacattgatataaatgccattctcgcacatccaacgatagagatcggttatcttatggaactgattccattgggaatcttccagccctttatgataggtatggtgggtagatgcgcatacgtcgccgggataggagccgtcgtgctcgaagcaacgcatgcctgtacgctcgaagaaggttcgtatatgatggaaatactcatatccccaatcgctgcaaaggcagggagcgctaccgaaacgcatcccccctcgttttcctgtcttgggattgataacatctacctcgtcgctgatccaacggcttgataagagggagtaacaccctaactctacacctttgttgcgggcgtaatccaccaaagatttatatttgacgatattttcttctgagatatcctcggcgttcaatccggatccaaagctgatgataaccatctcgtatccaacggtagcgcattgattgatagcggtacgaataacatccggatcggaagaggtaaggtgcatgaagatcggattctccgtagcccatggagctaccgtataatgtaagcgtcgtttaaacaaacccttccgttcccgatcatcgctgtcgaacggcatctcgtatacgctaaaggatttgaatttctggcccgccgctagggtataatcgggacctagtttgggcgatacgtctaatatacaaggcgtgagcaaaggataattgcgttgggaggtatattccggatcggccacccatttctccgtgatatcggtttcccgctcggtaaactctccgccacaagcatagtcgctttctacatgtatgttcggaagcctgaatttagagggatctccaccgccgggcgactccggttcggcgaatgccagatattccaattggaaggcatcgatatctatggactgcggggtattgttggtaacctccatacttttccggataactgggatgtgatcgtataagtcgtaatggagttctacggtgacaccttctgtttctttctctcctttcaatacgaaagtcagtcttttccctgtgggtacgttcttattcagtgcccagcggcttctggcccatttgatatcttcctgtagctcttctatgcggaaatcctcaatgagaaaagaaccggggcgagtagtcatctggtcgacccattccatttggaagtatccgcgctcgggctggccggccagcccgccaagttcccaacgtttcccgtcaatcgtcaaactgccttcgctacttacggcacgaagcatactttctccggtcatccggttaaagatatctagagtggagagattgggcaagacacggaacatacgtgctaccattccgtttgacaataagatgcttttgccatcgggagtcgcatatatgccggctttggatcgtgagggttgtaaaagccagtcgaaagaggtgttttccaaaggaagcccttgttggggcaatcgcttgattttatcaagtaatttcttctccgtaccggatgatacctccggccctttcccttgatagcttgtggagatgatcgaggggatgatctccatatactctatttggggcgtgatccataaggcatgatctccgctggggccatcgtcggtaggctctacgataaggtccaatatctttatgccatttagggggatatcgattgttttcggggcgtcgccaagtttgacgataccgctgttataaagctccttgtcatctcctttcaagataaataagaccgagcccggatgtacctttccgtctttaccttctagaccaacaaatgtcttggcgttttttcgggtatcgaaatacattttcgttccgtcaacaaaagggataaccgtgaggcttttatctgtataatcgatatgtgagtcggcgatcccgacctgtgcttgaaagcgtgacgcattcttgtgtaaatcgatcttgatatggcttttggcttgtaccccgatcacgtcatcatacgtttttccttgtatggaggcgggctcgttggtaactgatttccctttgacggcgccaccgtaggtttggtaggatttatttaggtccatgtccataagccggatttcgttctggcccatggcgtagagaccggcaaatcccgaaaggatagctgtaaagataagtttattcataaaatccagtgataaaagagcgtgttatcaatgataaaaataaggtgcttcaaaaagacttcttttgaaacaccttattgggtttataatctagtttcgttctattataatgtcgtaagttttaaattacgccaaagaaccttgatgcctccaccgtcgtgaatctgaagggcgatgcggcctttgccggctccgatcttctcgtcattcaagtttaccatttcctgtccgttcagccaagtctgtacgttgtcgccttgtaccttgatacgcatcgtgttccaatcgccctctttcaatatattctctttctcgtccggaatctgaaccagccagccacgtccgtacgactcatagataccacctgtatcgtgacccttcggagctacttctacctgccagccgtttactttcacgccttcctctacgaaagagcggatgaatacgccggagtttccgtcagcctcttgcttgaactctacggttagatcgaaatcatcgtaataatcacgggtagcgagataaccgtattgtttgtcgggaccgctttcgcaaaccaataagccgtcttttacgtaccatttctccgtaccgtatggttcccatcccgtcaaatccacgccgttgaacaagttcacttccttaccggtcttacggggaagttccttgatcttcaagttacggaaagatgcgggataaccatgatcttgcaaacaaagcacaccttttttcgccaatccgtattccggtgcgttggcccatttaccgctatttttcttagcgtgccaatcgtctgtccatgcctcgaactcaacgatcttttgtccgttcaaccaatgttccacatgtccgttatcgaatacgatcttggagttgttccattcgccttgcggattcaccttcatcttggatttatccggcaagtgcatcgcgtaatctacgcctaatttctgccactcttccaatggctccgggaagttcggctcgtcgatcaattgatactccggccctgttacgtaaggaacagcgtattggggacgctctaccacgtggtacaacataccgctattgccccccttggacaatttccagtcccaagaaagctcgaagttctcatactctttatcggttacgatgtagccactagcgtcgctgccatcacctttggcttggatacaaccatccactacatgccaaggctgtgtcaatgtagtcccgttgtaatctttccaaccatccaatgtctttccatcaaaaagcaggacccatccgtcagcgatttcctcgggagtaagtgtgttttgttcttgactggcacaagaggaaaacaaggccagcgataccgcacaagaggctaacaagcttgtggcggctgtttttttcattacagattccatgtaaataaagaatttaggttgataaattgtaactgaatggcaaatttacgtaaatatctttgatatctctctctgttggaggaaaaacgcttctctccctaggaaatacttctccaagagcctatatattctttgtcggataagctctatttcttaatttggcggcgctgaatttatattcacagccgctgaatatacaaatgccgccgctgattgtaaaatcagtggcgataatttaagaatagaataggtaccgatcaggtttacctataggtacgcataagttttattctggcacaatcaacttttatatgtttttgtggaaaagaatctggataatacttgtttaatcgaagaataatatagatattgcatgcatctaataaagactgaaataccctgcaaaccatatgataacaataggcaccttaaaactagatttagttgcggatcgggaacctttcgttcatgatttatatggtcgttgggatacctttaaccgaacctctttagaagggatcgtggatgagattttaagccgttatgatacggaagatgagttgatccggatcgagagtttagatttggatctaggtgagctagaagaagatgaattctatgagcaattcccccgtagactggcggagagactggacgagactttcgcttcttatttgcgaagtaaagaagagcatccagaccgaatagcagttgttcccatcaggcaatcttggctggaagtatttacctattatatgtcgcacgggtattggccttggctggaagaggagcgactcaccttaccggagcttctggataaattagtacgaacatcttcgatagaattaagtcatttcctgcgtgagaagggaaaggcgcttaccattcgtaaacgtctagtctttcaattggatgatatctatcaagaacgtttggtacatgtggtggtaccctcggaaagctcgtttataaacgcttatgcccgtttcttgcaagactcttatcccgagataaagcgtccggagatagggaagaatgattacagaaacgctatctggataatcctatggggatatttattatctcaggatcaaggctatttcaaccggaaacaaatggtgacgtacgcactgcgggaattatccggctattattccatttattttgtggatttactggggatgctgacgtatgatttagataagttcgcctctacccgcttgttcatgcccgagttactgtcgcttttgaaggatatccggctagagacattatcggaaaaggaattcactaaaaatttctctcttttttctctggaagaattgaaggctttgctcgtgcggcgggagaagagcttgactttcttatccgggtataatgaggaacagatttacctgatcgtggaacaggtgatccctgcggagagtccgtttgtcatcgactatgcgagagcgttggataaggagaaggaattgggcatgctcgaagggaaagccgggaatgatttccgggtgctgaaatgggtgtttatcttcgaggttattctcggtagaagtggaagcgtatattcccgccatcagttcgctttctccgtgttaaaggagttggcggcgcattataatctgacggtgatggagttgttgggatatttttaccgtaccttggctagtggactgctaacggcttatccagccgttcgggaattgatcattgctttgtacttgaatgctatcgatgattctcccgccggtatatccgtttattacccggaagatttgaaagatcggttggcttgtgccgttgctttatccgtttcttgcgcgaggagcaaatctattcggtggtcgagcaaaccgttccggtggaaagccatttcattatacggtatgcccagacgctggataaggggaaagagcaagggcgtttggaaagaagggtgggtgacgagttccggctgttgaaatgggaatttatctttctggtgctgtttagtgcgccattgtccgcttttagccggaaacaattcgtacgttcggtgttgggacagttctctgcccattataatatcacggtgcgggagctgatctcctatttccatgagggaacacatggggaacatccatgggtcccggaagagttacgtgagataatagatctgctgtacgaggatatggataaggaatctcccgagcctttattctctgtttggttgaatgaggagaggaaagcctatcggttcgggcaatttataatcacgggccgtgccgatgaaccgctgggcgatctattcgagtacgtgagggacttggagaagacgaacccgaaagtcttactggaccaattacggcaattgaaggatattccttcatccggaataagggtggaagaaccgatagaggccgctcgtatcttcgcttccttattactgcttgtcatccgtgaatacggtctggcttttccgaatcaggtatccttgatccaataccttacgaatgtaaaagagaatcgtacatttggagatgctgctcggctgcgcttgttattgcatgagtgtatgttggagaatatggatgcgtttacacgtaccatggatgctttactgggcacgaaaccggggaaagcgcccgagcttcccatccgtactgcttttcccgctatctatccgtccaattccaaaaaaatggaattattggaggaattatatacaggggcgactcccgctttgcgcttacttgtagaggaggtaatccgcttgtttcgtctcaatagcttcgggttggaagagaacctttggttggggtggttacaggctctttccggcaacgtttaccggaattattccaaggatggattgttgttcctcttttggcagcgtttgagggagtctgtgccagaggaggaattacgtaagatcgagacttttatagggcgacatataactaatttacctgaattgtcagtttttatatatcaacttaaaaataatatgaatatgaacgttttgaatggccagttaaaagaccatggcgtgtctattgacaatgcgggcctagtgatcatagccgtctacctgccaatgctttttaatcggttaggctacttgagtgatgacaggcgtgactttaaatcgaaagaatgccaagtgaaagctatttttgtgtcccaatgttttgtgacggatgagaaggaaatcccggagtcagaattattcttaaacaaagtcttgacgggctatgacaacagcccggaaccgcttcctcgctcgtgtgatttaaccgagaatgaattggagatcatggaacaattgaagaaagcggtacttatgaattgggacaagatgaggcatacaagctgggaaggttttcaaaaaacttttatccagagaaagggaatgttaaaaatggaagaggataattggatgctaacggtcgaggagaagccttttgacatcttattagactcgcttccttggaacttcaagctcgttaaagctccatggatggaaaaaatgcttagagtaaagtggcggtaaaatactattaaatgataacattatgaatgcggatcggatacagattcaagaaggacctttgcaggtctttcaaaaccgtaaaggtgaatcaacacaattgatggaagataatcgggtacaatctgtcttgcaggctaaaatggtggaaactatgcaacgtgacgcgatggatgaggatgatttgcagcaaggtaagttcgccgttcagcgggatgtggaagatgaggatgagcttcttcaaggaaaatttgtggcccaacggcaaacgaagaaccagacagggattccggattatgtaatccaaggcatggagtcttccttcgggacggatttctcttcggtacgtgtacacccggattcatcgaaagcgccggaggttggggctttggcatatacgcaaggtacggatatccatttcgccccgggacaattcaaaccggatacgtctgccggacagcagctattgggacatgagttgacacacgtcatccagcaagcagagggacgtgtgcagcctactaccgaggtaggtggaatggccgttaacgatgatttatccttggaacacgaggcggatgtgatgggcgctaaagctgcttctgtcttatgaacgagtggatcgattggttccagcgggtattggatgtctctattcgtttgtatttccggcaggagtgcgatttatcttccgtctatgatatcgcactcccgaaggcaggaccgctttggaaggcgttgttgccggaacaggtcgatcctactttcgatgagtggatggtgttgatgttggccttaatgcctcatctttctccgcaggtgttggatattttctttgtgcataataagaattttgaccgtccttatacggaatttggcggttggaaaggactatcgcacggaggattcttgccaacgggcgagacggccgttttcctgttggcgggcgatcgtgtggaacgccgtctggaagtggttcgtctatttcgtgaggagcattggttccatatgtatcacgtcgttggcttggaaggagccgggaatggtgaaccgttcttgagcggacaactgcgtatatcggaggatttcttgtaccgtttatcttttgagggagaatataagccggactataatatgggttttccggccaaacggattagtacgactttgaattgggaagatgccgtattgccttattatgtgcgtgaggagttggaagagataaataattggattacgggtcatcgagtcatcctttcggactggggattgagtcgttttttgaaggccggttaccgcactttgttttatggcccgccgggaacgggtaagacgctttgcgcgaccttgatcggcaagaagaacgggatggatgtatatcgtatcgatctttccatgattgtctccaaatatatcggcgagactgaaaagaaccttgcgaatgtattcgaccaagcggaaaaccggaattggattctctttttcgatgaggcggatgccttattcggtaaacgaacctcgacgaacacttctaatgatcgccattcgaatcaagagatcgcttatttgctgcaacggatcgaggatttcccgggaaccgttgttttggccacaaacttaaagagtaatattgatgaagctttctcccgtcgtttccagtctattatctatttcccaatgccggatcaagacttacgtgaggaattatggcgtagaatgcttccctcttcttggctacctgcggatgcggacaaaatgattcgtatggcagctacttatgagttatcgggtggctccatctcgaatgtgatccggcgttgtgcccttcggttgctaaagcaagacactccccggctagattccgatatcttatctatggcgatccgccgggaattgaataaagagggccggtggtgatttaaggcaacggctctctttcccggtgcccgatcggtacgatgattaagagaaaaaagaagagtgggagcgccaacagtatcatttgggtccatatgtcgaaagtttcccgcgaggatacgatattggtgattaggtataataccaatacgatctcggatatgaataccagtaatagaggcaagacatatcgcttataatgttgtgccaacatgtagaacttactggatgtcatatacaggttgattaggattaatagtatgagaaataggaatatatcacccaatacgaaataaataagcatcgggttggagaattccgtatttgccagttgcgccagatcatcggagcaactggtgagttgctcgccttgcggaaaaggatttagcaaatagaataaagagttgaaaagattatctagtaaggatacctcgcattcttcctcatacatgaccatcttgagtactggttcttgcttattctctcgattttcgcaagtagttacaggaacgcccatttcatcgtaatcgacaaaacaaaggcggtctaccaattggtatttcaatagaatggatagataaccgatatgctttttctccttgatagggaatatgacatttaaatcgtagtttctatatattttattacccatcacacaaaaggaatcaattacgaaactggtggacttcacgaattgtacaagttctctccggttctccagcttaaaatcgaaatcagggaagtaaagagtcaagccgttgagtttccggagagacgggttccggttgatcgtgccggtatcctttgtgaataagttatttaaaagagccatctgggattctttcgatcttaggaaatcattcgtcgcttttgagtttcggaataggaccagcaaatcgacaggcgtatccgaataaacgggcatatctaccagacactcctgttgttgccagtcgcttacttgactaggttgcccgctttctgtatccactacataccctagatattccatccggctgaatttccggataaggcctgccggtaattgctcgtatacggattgcaaccaatacggcacgatgggaaaagctcgttggttgtattgacttaggcgttcggataggcgttcggtttccgatgatgcgccatctaccttgaatacgggaatactgcaatttccctttttcttttgtgtggcgatctcttctttgctacgtttatcgaaataacagaagaacgtacgaatcgtggagggacgcagctcacgcacggatagcaaccagttctttacggcttgcgtgtaagtggtgtcgtaaacgaatgggatgaaatcggtttcccggtatccaatggcgtcttcttcccaaggcgtgatgttgagggcgatggaaaggggagcttctttgatgaaaaactcaatcgttccgcttcctctgatggagggattctcgtccggattatccagaactcctgtaacgtcttctgtccatacggggcaaatgatatagccttgtttatcggagttgagcaacgattgcatattatccatatctccggttttgcccttgaagaaatacatattctcgacggtagggggaggcaatatcctttccggttctcttttattgaaataataccacaaagcttgcgttactttgactgggccgggcattgcatcgaagaagcggaagagaggatctgcgttggccttattcttggatgcggttaataactcgtttccgaacaaccaaggtgtatatgcacattgttccacatgatctggtaataaggaactcggggactgtaaataacccaaacgcaatatcgcttggttcgcgtccggatttattacgaaagtgaaagcgttccccaattcagcgggatagacgatataactgcattgctccgttaagatacgctgggtgatcgagtccataagagcttgataggagacgatcggggtacgaatctcttccagttccaattcggtccgctctcctaaactccggaaataatccaatcgctccgagagacttctttgggcgttaacggcttgtgccatgattacatgaagtaataagcccaataaaatgccgtggtaggtagttcgatatctggttgacataagggtaaatttaaagttctatatttattcgtatcagattattctttaagatttctccggtgcggtcaatctctttgtcgtctttatcggcccacgcttttcgccatgccttatagtctttgacaaatagggctagctctttcggaggaagccaatgaaccgtgaatcgtagatgtgccggtatcttctctcgcaagaattcttcaagacgaagctgaaaatccggccgttgccgcgtacgttctgtttgtgagaggattgccgttaaggtaaattcccgggaggggactggatgatcagtcgccttcggtgaatgcaggagtatgttttccagaatgaaaatttgctctttcgcatcttcccatccgagtatggaatagagatatctttccaatccggaaagggagtctgcgtcgaatagattacagcctagataccggtcccggataagttccggtagttgtcgcaggaaccggactcttcgttgacggtttatctctttatgggagtagcggagaaaaggctggttgctattttcgccgtagattttatccaacgtatccaatagcagatctttgttttgttccatagaagcggaaccgggggttcccatatttaaggccatccaatcttttagatggttcatttctttatgtccctccgaaaagagatggtcgaatatagaaagatatgccttgaatgaatcggtaaacgagtccttgtagcaaatcgggaaatcatttgtgacgctataatcattcagatggatatggcgactgtccatgaggatcgatttggcttgttttttctgttctcgtatcgcatggttgatattattccgcgaatgcaaacgattcaatacttttgtggcattaatctctactgcttgttggttttggtaaagtcgtatcttgatttgctcaggggaagataatgccaatgtataggcgtattcaccctcttcaaaaccttgaaattccaaagagtgtatcgatagaaccccttgtatctgcttgatccctttgaaaagcttgtatatgggaagcgcactacctgtataatgacttcccggtgcgaataattgaatcgcctccgtataaatggcgatcaaggttttttccggagagatgctaccgtctatatcgatatttccaataagtaataaaggttttcttcttacgaaatggattgcgtgtagggcttctcctaaattccggttcgcgtgatatagttcctcaatcttttccttgattttcttttcttcctgtttgtgttgatcttctgagataaaggacgagagttctataaataggtcgaaccatccgtggcagatctgatcattggatctataagggtggatttgcaggtccgataagttcattaagtaatcagtgttatctaattgatctaaaaaatggtctcggtaatctttgggtgtcacaggggccatcccggaaacccgttcaggactgaacaagccgtaatcctccggattgaaacgattattcgatccggtgagatattgttctaatgggaaactcatttggtaatccaattcgcttaaggcgtaatttaagatgtccagagtcgtgattcccgggtcgtgcggggcatggtctgtccacaattgtcccgaaagctcccggattgtttccaaggcattcttttggaggttatcgaatatggattcctccgtttttagttcttgcaggttgggcagatcatccatggctattcttgattaaaggtgtttctccggtcggaggcatccatccggtaatctttccataaatcggttatcaggaaacaaacaaagatgttgtctccataatcccgtccgctacgtatttgcaacttgcatttttgtccggggccgtaccaacggaatttgatcttgttaaaaaaggaaccgaaccaagattgattcgtacggatttttcgatgtttcccgtaacaatggatagccgtggcttccaccaatgcgtattgtccgctttttaacttaccgcatccagccatgatgcggtaggcacgacatccttccgttggtatttgcagggtatgccattcgccatctgcgggaaatttaccccgtatcgcgccgtcgaagcgggttgcggaaagactgccgttgatacgtatatccataccgggttggttcatctcgatacgaccgtttggatgaagcgatagtatcggttcatcttgcccttgacgtatgatatggagttggctattgttacctaggtatattttccactcaggaatattgtcttgtatgttcgtgaataagctgatgacgggactgttttccttggaaggagctaaccgtaagccatcatccggatttttatcgatcccgtcgtcggaaatattgaccatggaatcgattaattcgtagaaatgcttttggttgggcatacttccgcgcttaaagtattcttttagtgtatttctgtttgtacgaggcatatccggtttgttttatttgttaataataaaattacttccaactcctaaatatccgagtccgagttgttccaatagttcgtctttttggtcaatatatagcaaatgcctatcagaaggaactaatatgcaccaaggttgggaagggctaacgttgaaattttgcctagcctcttccgggtagcggtttagataatagctcttttgttggtcttttgccgtatatacgacatgcgctacgcttaatatatcaatgtccacgatggcttcacactctcgtatggagttataaagatcggtcgatgagaacgaaagcccaaataccgggatctcttccttatctcgccaaggtgcgatacaattattaatgcgtgcctctgtctggcggagtatatctcctacgggatatccgggctttatccggaggttacagcaaacggttacttcctcgtagaccggagtgattgcatcaacggtaatgaacggacttgtcttgtcacctatataatcttcgattcgcatgagtagcctatgttcgcataaaggcaagatctttttatctttctccttttgcatcacgaccaatgttacgatcgggctcctgttttgagctttactgtctattccgggcaagcaaagtactttttcgacttcggggaactgagccaatgttatttgctcgtaattcctaggcaatacagcccggttccgatgggacatctcttgggtgatccggagccgcatatcctctggcgtttccggcgaacgtcctcctttagcgggtatgatctggtaaatatccgtaagtcccggcatacttttctcgaaagaaacgagtcccgtgaagctttcgagttcctcaccgatcagggcttccatttcttcggggatttctaaccgggctttcactgggtttagatagacatttcgtatggatgaacaattttgcgtgtggcaagatacttttgccgaaagccagaaatctccatttatgtcaagcatttcctcgctaataggtgagggaagcaggatgtctaccaaacctgtattcaacagattcccggttgtatcggaaagtaaattacccggtttgataaactcccattgcttgccgttgaagaaagaccattgtacgcaaggaagatattctttttcgatttcccgtttcaaggcagccatctcgaagaataaacggatctggtcgttaccgatcgagttaccaataccgaatagaataatcccatcttctgtgggtacttccaccattgggaacggatgacgtagatcgatttcatgtaattccttttgcctcaatggatggatatgatagatacggcatctatctcttggggtatcgccattgaaaaagtattcttcctcggcgctataaccgatacctatactttcaatcatagggttgtaaggaggtttgggcaccggggtctgtttacgggtatggctgtttcttatcatgatatccgcaaagagcatccggtactccgtctgcccgaatccgccgttcggatctgtgagtctaatcctgaagaagccttgctgggctttcatgtattgatattgctcttcttccgtggagaccgtaatgtttttgaacggtttgtcgtaaacgatctcgctgtactccgagagctttcccctaggggaagtatgcttgtttttcgtattgaagagacaagatgtactttccggtaattttacccatttctggtctgttagtttttcccattcaactttgaaggtggtattatcgataggtgtcttatatgcttgatacaaatcatagaaacctccttccgaataaggtagatccgcccattgcaaagtaatacccatggattggataggcttgatcgctatctcataattaccgaatgcgaaccatgagcctttttgagcttctaacccgaataaagggaaatgtacgcttgcgtctacttctcccagaggattatagattttcaaggatgacatgccggatacatgtacctttatctttaagctagtaataaaaatacggtgtacccaagagtaggggaataaccaagcatccgtgttcatcaatatacggagcgctgggttccgtgtttggcaaccatgagcttcagagcaaggtgttgtagggtcgaatttctcattaaggacgaatttcagataaaaggagttttcgttgatgaatgtcaaggtgtaggcgtatatcggggcccaacctttctctgtgcttaactccaataggaaagcgtcgtttaatacacgcccggtttcgtgggaagattgttccgtagtagcgattaattctttgaaatatgatatggagtcttcttctaatccgaatgtgatatgtatatcccgatgtccttcccgaagtaataacatgggagattcgatcatcagtccggcttgtatagaggattggttctcaaagattagctctgagtccagattgggcttcttagaaaaaacttttccgatcctgtcattcaactgtttttgccagatggacgtaacgaagcctaatcggctcgctggatatttttcggatctttttccaatagtaacgaatgtatactcgttattttcatgtcattgaccgaataatcttcgtccgtacgataacaaaattggatatcttgcgcaggaaatggtacctgtgttataatacctgtacccttgggtaactgggcttgccgtgcggtattattcttcacggcgataaaccaagcggaaggaataatcgctttttggggagattccttcaatatttggttgacataaaataacggataagcttcccagcgtttattgaactgatctaccagatattgatagtttttcaagaaagcgattaaaacagctaatgagggatcggtctctccgcttttagcgatttcttggatgtaaatctcccgtttgttttgtaaattgcggaggatacgtaataataggtagagacttctacgaaccgttttaggattggatagggttattagctgaagtctctggttatatttctccatatccagaaataaatcggacatggaatctctaaagatccgatgattcaatctttgataccaatcagagaacttatggtatagagcgtttcttagataggtgatttctctgttactttccggtgagttctcattttgccacaaaatgaaactctgttcgatcccgattgtatctgtttgcttgatctcattgagtatggctaaggattggtaatgatataaaaaggatgatttcgaaaaggcacgagccaataaattggagagatttttctcgagtacttgaaaaggctcatgtatccggaaatcattctccaatttttttcttgtcaatccatctttattccattgtttattcatcggttagaatcaaaatagataggataggtcaattcttgttggacattattcatacgtatcgtataataaagttcgataatcagaatgccatcttgaatcgaagccttattaatttctatgcgatcaagcgagactctaggctcgtataagagaacagccttctcaatagcgcttttaatcatggtctccatggtaagatctaattgttcaaactgataacgatatagttccgtaccgtaatccggacgatgtattcgctcccctgtgcgagtggagagaaggatgatcaagctttgccggatgtcttcttcataattagacatgcgggtgggattatcattatggctgaattctggggggaatgcccatcctttacctaaaaaactatttttattctgcataaatcattcgatttaattaatcattacaacgcctccttttacaacggtttggccggatgcggatatttcggcggtggcagacccttttactttaactcccatttgtgcggaaacctcgatattcaagccatttatcttggtatcttgcttagacttggattcgatacccattccttctgtcttgacattccctcttgccttaaatatgagatctttgccggattctaccataattccgtttttatccatacagaccttgttcttattagcatcggataacagaatttgctttttgtcatcatccaatatgagcgtgttctctccgggagtccttattgtgataatctttttatcatcgtccaaagtaattttcaactggttttttgtaacaattgtctttaaattattttttggatctaaagaaaccggcgtttttcgtttgcgactgtacaaacttccgataatcacagggtggcaggggtcctcattgatgaattgcaggactacctcatcatcgacttccggtagaaataacatgccgaccccattgcttgcgtacggactgaccggccgagcccatatctccgtcttctcacattgtaacaagggtatatcgactaatataaaattctcgaaatctttattatctccgatctttttaacgatccctatttgtaatcctcgtataccgggcaaaaaaccactagctgcgggagcgactacatcgggctcttcggtaatgactaccggattgaaacccatatagacttgtgtcttccattcgcctccttgtagtgtatgttctactgattgaacaaatgcgtttccactataatgtttgcttaatccttccaatttgataatacagcccggaataatagacgcattcccgtaaattgtgatggagccttgaaaacgtgccaggccgctccataaagcttgcgcatcggcccaagcatgtaaagaagcgtcgccgatgggagcgttagtttgataaagcatcacttcatttgccagaccggatagatcctttgcggcgatatcgccttgggcattgagaggaggtttgctggcggtggctttgataatttgttgacggctcacgtcccaagcgcaagcttttgtatctgtgtattgctcggaagcggatatagaaccatcgaaagcgattaaattatctccataggtgatggttaagaccggggaggcggatacattcggtttacataccttgacttgtttaccgtcagtgataacgactaatccgttattttgtgctcgtgtgagtacaaaatcccaatctgtacaataatattgtaccagttgtggaatttctataccggtgctatctactttggcggaaagcccgtattgtcccagaatcttcttgataacggtatcatctttactattttcatatacattatttttacgtccaaaggttacaggatatgcgaaacccctacattctaaaataaatagagtttgttgttcgctattgatttttaactgatgggttgtaacgcatccctcaaataaggtgttgaccttatctgttggacccgcttgaaacttaagctccgtacccggattgaatattttgttgtctggtatttcaaattggctgttgtcgataatatcagcgctgatggagatcgttgctttatcgatcttattacatgctctgtatatttttgcattgattacggagtattgctccgttacatctttaccatttagtaatagtttgattatgaatgaattatccatattcattatattttagggaaccataattgagttccgggttttatatctctaaagctgattaggttatttatggaggcaatcattggagcataaccagaatttttatattcttttgcgcataacccgattagactgtctccttgtttaaaagtaacgaatttaccctcagctttttgatttttcttttttgcttgtgtctctctactactaatcgcctctgttagtgacaaggagcctttagctcgtaaaggattgcccttgggcgagaataaggtgtaatcccaatttaggttggttaatctccccttgaaaatgagactcccccaaattactttaaggaagcaagggctgggtggatcgatctccgcgctaggaagaaaaatgatattctccaaatccttgatcctttctgtcacggtttttttccccgtcgggataataccggtaccatcgaagtgtatatcaaaagagagagtggaggggttggtgtgtttatactccggtagttgcttatcctcttttatgctttcgtctttcttataggaggtagatttgcttaacttatagctatccggattgatttggacggtgatactacccaatttctcgccacctttgtattcaattgatttatatgcctcgatgatcaacttttggttcatgttttaccgctcctttctacaagaaaaaaggttagacaaatctttcttggcctcacgaattatctcctctttgatttgttgtatcaaatcacgggagagagggaggtcgggttcctttttctgttgtgtcacttttgtggacacttggatttcttttatagttatagccattgcttaaattgttcttttttcgtatcttctgtatctcttatcgacatacggatcaaattagtataagccatctccaatgtttcaatcaccaactcattcttttgggaattcaatgcgctaatgtcccattttacagggtaagcattgagcacagaccaattatttaggggaaaatgcccggcatccagcaatgatatagttaaattgacgggaacgatctgggcacttccattattttccaatactttaaccacatatgtctctagcacatgaggcaaaggcattaaagaacgtttcaacacaaggttaccgtgctttcgtcgggtaggcacctgatagctgaaactgttttctcccccttctttaatcgtttccgtctccatttcaagttgtagtcccgagaccttttggaaagaggtctcgatcaatccttcgaaagtcacgttgaaataaaacgctaccggaggagggacaatatgatcaaaccttagcattaagcgttttctatggtcaatccttcatgcgctaaatctaaggtttcgatggcagcctcgtttccatcggattttaagctgacaccggtaaccttagtcggccatgcgttcgataatttccaaaccatcgtagggcttcctgcttcatccagtaagctgattgttacatcttctcgctgtattgtgttcatttttatcttgttaaaccaatcgaataatttgttatccgctttgaaaacccctttctttagactgacattgctcgtcttcttcagtcccggcatcttgatatttgagaaaaccgggctattaccatgtcggtactcaattacttgggcttccatatccagaccagatacctctttaaaagcgatttccccgaggctacctaattctaccttaaaataaaaactgggtaacggccatacattatcttgtgcttctcctgccatattcgtattttttaataggttttaattcttaaattatcagcttttttgcatttgttgttggaatgtgatctcgataaattccgcaggtctggtaatagccacgaatacggatatcctgaggataccttccagaatatccttcggagtcatcgtgtctcccaatccgatatgaatgctatatgcgtcttcgggggaagttcctgctaatccacctcgtttccatacgccccgtaagaatccatctatcatactacgcatatttacccatgtatttactacattcggttcgaatacataggcacgggcggcgttcttgatcgattcctctaggaagatcatcgtacgccttacgttaatataacgccagtctaacgagttaccatccatcgtgcgggcaccccaaaccttgattccttcaccggggaagctacgtatcgcgtttacggcttttccattcatcggtacgttcagatcttctttggtaataagactcttccttaatctttatcggatattctgtgctgatacgaaaaacgtccttatccatgaaacggatttgctcgggattcttgaagctaatattttccggtccattatcctccataaaaatatccattgacgcattttctggattacgaggtatcaagataaaatcccaataggcttcttttgtgtgataatggatttctttctgtattgggcatttcgtttctaataattctttggtaacatgaatgatcacattgagccgattcagtcggttatcgataacacttaattgtatatctgaatcatttagctcttccggtagcagggattgtgtatacagtaaaaaattcggatcttttgaatgtgcttgaaactcaaggttgagaccatccggggaggttgaaaggtgatcaagaagctcttctcgatctccaattagtgcatattgatttcgccccgtttgcctaaaaggatatttaggtcctcctaatacgactctattcgttctcctgggttctatctcgaagatttcagaaggaatacattcattataatattcatgactaaatataatgttaattaaaaagtcaaatttcatcattggtttgttttatcgttataatattccaaaagtagataaaaagaatatggcatgatattaaatactatatgtttgataacattatttctaatttattttttgacttgatattcgttgttttatatccttgatttctgttccggcaaaagatatgattcgtgctttacataggattgatggataataatgccctcctaatatactccatatattactgagttcttgcatactaattgttatgggctcgagcgttatggtaccttggtctggtaatttaagaatggaattttgttgtaagaaggagattgaatccaataatatttgtatagattctaagtatcttttagatgaaaaaacagcggcaaccataatatatatattcaagtaccatggtggagatgtttgttggaatgtgttattttttgtgctcctatagggggcagagattcccattgctgtctctcgctctatattcacgatagaaagtatgattttatccgattgatcctcatttggagtcgcatcaatacttccggcttccactataatttctgcccgttcataatagctggaaagaaattcgttcattttctctgcgagtgtgtttattaatacgtgtatcatggtcttttgctttatttgtgctaaaggtaaggaataaatttgtttttctgctttataatttcattgtctgaattctttctagcaaattaccttcgtttcgattcgtgataagaattaaaatcgttttctgattatcatagataattacgtcttggcggtttcctgaaaaagattgaaagaaaagttgatcctgagattgggctatgcttattgtgtattttttatctactcttattttctattatgtgacttcggaaaaacacgtacgacttttttcgaaaacacgtacgacttttctcataaacatgtacgactttccggtaaaacataatcgtgtttttaagctgttaatgttcagtgatttatatttttgtatcattcacgcacttattgtatggaaaattatcacatcgccactcaataaatcatatatacctccatgtagaagtgcggcacgctatgtctctataacaggatgtctccaatagggtgagaatcgagtagtatggctttatcacacgtacattatataacttgttaagtcttgaaaaaaaaacttgaaaaataattccgaaaaagtttggaggttatgttttataacactacttttgcacccgcattcgagagagaacgccggtacaaaatgatgaaacaaacttttagaaaaaaagttccggaataatttggaagtttaaaataaaagtccttatctttgcatccacgttcgcaaaacgaaagcgacaaaagagttctttgagagatttacataattcaacaagtagtacaagtattggagaagagattctccggattaataccgtcaaaagaagtatgactttggactacgataaacggattccggagcgaggatatgataaaacaatttaaacaacgaagagtttgatcctggctcaggatgaacgctagcgacaggcttaacacatgcaagtcgaggggcagcacaggtagcaataccgggtggcgaccggcgcacgggtgagtaacgcgtatgcaacttgcctatcagagggggataacccggcgaaagtcggactaataccgcatgaagcagggatcccgcatgggaatatttgctaaagattcatcgctgatagataggcatgcgttccattaggcagttggcggggtaacggcccaccaaaccgacgatggataggggttctgagaggaaggtcccccacattggtactgagacacggaccaaactcctacgggaggcagcagtgaggaatattggtcaatgggcgtaagcctgaaccagccaagtcgcgtgagggatgaaggttctatggatcgtaaacctcttttataagggaataaagtgtgggacgtgtcctattttgtatgtaccttatgaataaggatcggctaactccgtgccagcagccgcggtaatacggaggatccgagcgttatccggatttattgggtttaaagggtgcgtaggcggccttttaagtcagcggtgaaagtctgtggctcaaccatagaattgccgttgaaactggggggcttgagtatgtttgaggcaggcggaatgcgtggtgtagcggtgaaatgcatagatatcacgcagaaccccgattgcgaaggcagcctgccaagccattactgacgctgatgcacgaaagcgtggggatcaaacaggattagataccctggtagtccacgcagtaaacgatgatcactagctgtttgcgatacagtgtaagcggcacagcgaaagcgttaagtgatccacctggggagtacgccggcaacggtgaaactcaaaggaattgacgggggcccgcacaagcggaggaacatgtggtttaattcgatgatacgcgaggaaccttacccgggtttgaacgcattcggaccgaggtggaaacaccttttctagcaatagccgtttgcgaggtgctgcatggttgtcgtcagctcgtgccgtgaggtgtcggcttaagtgccataacgagcgcaacccttgccactagttactaacaggtgatgctgaggactctggtgggactgccagcgtaagctgcgaggaaggcggggatgacgtcaaatcagcacggcccttacatccggggcgacacacgtgttacaatggcgtggacaaagggaggccacctggcgacagggagcgaatccccaaaccacgtctcagttcggatcggagtctgcaacccgactccgtgaagctggattcgctagtaatcgcgcatcagccatggcgcggtgaatacgttcccgggccttgtacacaccgcccgtcaagccatgggagccgggggtacctgaagtccgtaaccgcgaggatcggcctagggtaaaactggtgactggggctaagtcgtaacaaggtagccgtaccggaaggtgcggctggaacacctcctttctggagcttcaggattccgtaccgaggtcatacgaggtattgatccccttgtgctgctgttgagattatgtttatatatagatcttacagaccgggaggccggtcaaaaagagagaaaatgacgctgggacgtaagtcttggcaaagttgacagtcctatagctcagttggttagagcgctacactgataatgtagaggtcggcagttcaactctgcctgggactactccgaatgagggggattagctcagctggctagagcatctgctttgcacgcagagggtcaacggttcgaatccgttattctccacacatcccgcgagggaaagaggatctttgacatgttggacatcaaaaagaagaaacaagtagagcgagcttaagatatatcaacccgtgcgtcaagtgcgaggtgagagaaagtaagcaagggcagacggtggatgccttggctctcggaggcgacgaaggacgtgataagctgcgaaaagcccgggggaggcgcaaatagcccttgatcccgggatatccgaatggggcaacccggcaggctgaaggcctgtcatcccgtaagggaggcgaacgtggggaactgaaacatctaagtacccataggaggagaaaataaacaatgattccgtaagtagtggcgagcgaacacggaagagcccaaacccatgtcgtctaggcgacacgggggttgtaggaccacgacgtggcaagatagagtcaagtggaacgccttggaaagggcgaccgtagagggtgatagtcccgtacacgactgacgattgaagcctagtggtatcctgagtagcgcggggcacgagaaatcttgcgtgaattagcggggcccatcccgtaaggctaaatactcccgagagaccgatagcgaaccagtaccgtgagggaaaggtgaaaagaaccccgagcaggggagtgaaatagaccctgaacccgtctgcctacaagcggtcggagcgtcgtaatgacgtgacggcgtgccttttgcataatgaacctacgagttaccttccccggcaaggttaagtacctaaggtacggagccgaagcgaaagcgagtctgaacagggcgccaagtcggggggggtagacgcgaaaccgagtgatctacccttggccaggttgaaggttgggtaacaccaactggaggaccggatgggtaagcgttgaaaagctttccaatgagctgagggtaggggtgaaaggctaatcaaactcggagatagctcgtactccccgaaatgcatttaggtgcagcctctttatagtatatcgtgaggtagagcgactgattggatgcgagggcttcaccgcctatcaagtccagataaactccgaatgcgcgatatatatttacagggagtgagggcgcgggtgctaaggtccgtgtccgagaggagaagaatccagaccaccggctaaggcccccaaatgatcgttaagttgaactaacgaggtcggatcgcagagacagctaggatgttggcttggaagcagccattcatttaaagagtgcgtaacagctcactagtcgagcgatctggcgtggataataatcgggcataaacgatctgccgaagccgtggatgtcgcaagacatggtaggggagcattccatgcggcgtcgaagatgagggatgacccttgttggagcgcatggaaaagcaaatgtaggtatgagtaacgataaggggggcgagaaacccccccgccgaaagaccaaggtttcctgatcaacgctaatcggatcagggtgagtcgggacctaaggcaaagccgaacggcgccgccgatggaagaatgggttaatattcccatactgcctcatggagtgacgtggagacggagaagtgacagtcctgccggctgacggaatagccggttgaagggtgtagatattgattcccgtaggcaaatccgcggggagagtcgaacctgagagtatacggagcgcttgcgcaacgtaatatggacgtaaccatgctcccgagaaaatccgctaaacttatccatgcggcacccgtaccgtaaacggacacacgtggtcgggttgagaatactgaggcgctcgagtgattcacggttaaggaactaggcaaattgaccctgtaacttcgggataaagggtcctcgtcgtaaggcgaggcgcagagaataggtccaggcaactgtttaacaaaaacacatggctgtgctaaatggaaacatgatgtatacagcctgacacctgcccggtgccggaaggttaagaggagatgtcatccgcgaggagaagcgttgaattgaagccccggtaaacggcggccgtaactataacggtcctaaggtagcgaaattccttgtcgggtaagttccgacctgcacgaatggtgtaatgatctggacactgtctcaaccgtgagctcggtgaaattgtagtatcggtgaagatgccgattacccgcgatgggacgaaaagaccccgtgaacctttactatagctttacattgagtttgggcagacgatgtgtaggataggccggaggcattgaagcaggtacgccagtatttgtggagccgacgttgaaatacggcccttcggttgtttgagttctaactcctagttaggaggacactgtatggtgggtagtttgactggggtggtcgcctccaaaagcgtaacggaggcttctaaaggtgccctcagaccgattggtaaccggtcgcagagtgtaatggcataagggcgcttgactgggagacatacaagtcgatcaggtaggaaactagagcatagtgatccggtggttccgcatggaagggccatcgctcaaaggataaaaggtactccggggataacaggctgatcattcccaagagctcatatcgacggaatggtttggcacctcgatgtcggctcgtcacatcctggggctggagaaggtcccaagggttgggctgttcgcccattaaagtggcacgcgagctgggttcagaacgtcgtgagacagttcggtctctatctatcgtgggcgcaggagatttgcgaggctctgacactagtacgagaggaccgtgtcggacgtaccactggtttaccggttgtcccgccaggggcaccgccgggtatctaagtacggatcggataagtgctgaaagcatctaagtacgaagccggcctcaagattagatctccctcaagggtggttatagacgatgaccttgataggccacaggtgtaagggcggcgacgtccgagccgagtggtactaatagcccgggactttcctcacagtgaaggttgatatattttaagacgataaggcgaagctggtctcttcggattgatgtccggtcaaaatcttgataatgatattaaggtggctatagcacgagggatccacctcttcccattccgaacagagaagttaagcctcgtcacgccgatggtactgcgtaacagtggaagagtaggtagccgccgtcttaggtgaaaggagtcagtcgaaagattggctcctttttttgttatatacaccagccgttgtagagacgtggtgtgcctcgctcactacagactgatagtattgttactattgctaggggatgagacgcagcacgctgcgtctttacaactgggtgagatttcattgtttgctgaatcgggaacaataaagttcgtatcttgccgttatattaagaattcaccgaatgattctgatttatgagcagcatatatgattctcgtcaaagatggaaattaggctttatttttgccgctgtattgatcgctatggcttctgtggtagtatcggatctcttgattaaagatctggcccgagaagagcgtcagaagatcgaggtttggagtgaggcaacccgggtcatgaccagtgagaatccaagccttaatatgaatcttatcctaaaaatcatccaagggaatacttctattcctgttatattatgcagtgagacggatagcgtggtttcttataataatatagagattccggaaaagaatgtagcgcagttcatgacgaataaggttaaggaactgagaaccaaaaatcctccgatcgtaattgacatggaggatggtacttaccaatatttatattacgatgattcgattatcttaaagcgactgcttgtttatccctatgcgcaattatcagttgtatttgtttttatattaatcgcttttttagccttggctagtacaaagaaggcagaacagaataaagtgtgggtggggttatcgaaagagacggctcaccaattaggaacgcctatatcctcgctaatcgcttgggttgaatatttgcgaacgaaagatatagatccttctctattgacagagatggataaggatgtgaaacgcttacaaacgatagcggagcgtttctctaaaatcggttcagatccagatccggttccgacaaatatcgtggaatccatccgtgcggctttgggatacatggagacccgtatttcctcgaaggtgaaaatcaatacgtatttaccggagcggccgatattggtcttaatgaatgattccctgttcgcttgggtaatcgagaacctgacgaaaaatgcggtggacgccatggaggggcagggtgagatttcgctaaaagtagaggaaagagagaaggtcgtgctgatcgatttggctgataccggaaaaggtatcccgaaatcaaaattcaagacggttttcaatccggggtatacgaccaagaaacgtggctggggattaggcttgtccttggtaaagcgcattatcgagtccttccaaggaggaaagattttcgtgaagagttcggagctagggaaagggacgacttttcgtataaaattgaagaaatataagggttaaatcgtattataggaaaaaataagcataaaggtattgtttttgtatttagttttttcgtacctttgcaaggtttttacactaaaaggctttggggaaatttaaattatataatgtagatttgaaaaatctctctccgggagtacacgaattcgagtatcttttggagaacaagttttttgtggacattgacggaaccgaggtccagaagggcaaagtgaaggttcatcttaccgtaaaacggtcgtcaatgatgtttgagatgaactttcagatagaaggggttgttgttgttccatgcgatagatgcttggacgatatggaaattcctattgatacccacaatcgtctggtggtaaaattcggcaaggaatatgccgaggaaagtgatgaggttgtcgtgataccggaagaggagggcgctattaatttggcgtggttcctgtatgagtttatcgctttggcggttcccatgaagcatgtacatgcgccgggtaaatgtaataaggcaatgtcgtctaaattgaagaaacataccgccagaagttcggatgagaccgaagacgattttgaggatgacatgggaggtgatgatttggcgttggaagatgacggaaacgctagtcctgccgatcctcgttgggatgctctgaaaggtttgctagagaatgataacaattaaataaataaaacaatggcacatcctaaaagaagacaaggtaagacaagaacagccaagagaagaactcatgacaaggctgtagctccaacaatggcaatttgcccgaactgtggcgcatggcacatctatcacacagtatgtggtgagtgcggttattacagaggtaaattagcgattgaaaaagaagctgctgtgtaagtttgtcaacttatatggtttgatgaacaaaagaaatagccctaaaagtttttttagggcttttttttaattgggataagtagtccttttatttttaaagttatggataagataaatgcggttatcacaggagtgggtggatacgttcctgaagatgtattgacgaatgaggatatttccaagatggtcgatacgacggatgagtggatcatgactcgtgtgggtattaaggagcgcaggatattgaaaggggagggcgtaggactctcttacatgggtatacgggccgtgaagcaattgctcgagaaaacgaacctgaatccggaagaagtagaggttgtcttgaccgctacgactaccccggatcatcatttcccgacaacttcttctatcatcgcttatcatacaggttgtaagaatgcgatgacttttgatatgcaaggtgcgtgcgcaggcttcttgtatgctttggagacgggcgctaattatattcgctcggggcgttataagaaggtggttgtcgtatcgggtgataagatgacatctattacagattatcaagatcgttctacttgtcctttgttcggggatgcttgcggagcggtcttgctggagccaactaccgaggagttcggtgtcttggatactattttacggacagacggcgtaggctatccgcatctgatcatgaaatcgggcggctcggcttatcctccttctcacgagacggtggataaccgtgagcatttcgtttatcaagatggacgtgtggtcttcaagtacgcggtttcttatatggcggacgtggccgctgagatcgcggagaagaatggcttgacgcatgatgatatcgcatggatcgttcctcatcaagcgaacctgcggattatcgacgctacggcgaaacgcttaggcgtagatatggataaggtgatgatcaacatccagaaatacggcaacacaagcgccggtacgattcctatttgtctatgggaatgggagaatcaattgaaaaaaggagataacctgatcctcgccgcttttggagcgggctttacgtggggagcggtttatctgaaatgggggtatgatggaaaaaaagcataaatcgggttttgtcaatatcgttggaaacccaaacgtaggtaagtctacgttgatgaatcgtttggtcggggagcggatttctattatcacctcgaaggcgcaaacgacaaggcatcgtattatgggtatcgtgaataccgacgatatgcaaatcgtgtattctgacacgccgggagtcttgcggccgaattataagttgcaggaatccatgcttaatttctctcaatccgccttaggcgacgccgacgtgctgttgtacgtgacggatgtcgtcgagacgattgataaaaataatgagttcctagcacgggtacagagtatagagtgtccggttctcttgttgatcaataaaatcgaccagaccaatcagccggagctggagaagctcgtggcccagtggaaggaattgcttccgaaggccgagatcatcccgatctctgcgctttcgaatttcaatatagattacgtgaagcgtcgggtggaggagttgatgcctgattccccgccttatttcgagaaagacgccttgaccgataaaccggcccgtttcttcgtgacagagatcattcgtgagaaaatcttgttatattatcagaaggaaataccttacgcggtagaagtggtcgtcgagttgttcaaggaagatgatgagctgatccatatcaaggcgctgatcatcgtggagcgtgatacccagaaagggatcatcatcgggcatcaagggcaagcattgaagaaagtaggtgctatggcccggaaggatatcgaacgtttcttcgggaagaaggtgtttttggaaatgtttgtcaaagtggaaaaagactggcgtaaccgtgacaacatattgaagaacttcggttatcagctggactaataatagcatacgaaaggagaatttatgggaaatatagtagcgatagtggggagacccaatgtaggtaagtccacccttttcaaccggttgacgggtacccgtcaggcgatcgtgaacgaggaggctggtactacccgtgaccgtcagtacggcaaggtggagtggaccggcaaggagttttcgctgattgacacaggcggatgggtggttaactcggaggatgttttcgaggaggagatcaacaagcaggtaaaagtggctatcgaggaggcggacgtgatcttgttcgtcgtcgatgtattgaatggcatcacggatctggacatggaggtggcgcagatcttgcgtcgttgcaagcggccggtgatcgtggtggcgaacaaggcggataattatgatctgcatccggcctcggcggagttttactcgtttggcttgggagatcctttctgcatctcggccatcaatggttcttataccggggatttgctggataagatcgtggcgacgttgcccgaggagaaggtggagatactggaggaggagttgccccgtatcgcgattataggacgcccgaacgcgggaaaatcttctcttatcaatgcttttattggcgaggatcgtcatatcgttaccgatatcgcaggcacgacccgtgattccatctacacgaaatataataaattcggcttgaacttctatttggtggatacggcgggtatccgtaagaaggggaaggtgaatgaggacttggagtattactcggtgatccgttcgatccgcgccatcgagaactcggatgtctgcgtgctgatgttggacgctacgaggggtatcgagagccaggatatgaatatcttctcgctggtgcagaagaataagaagggattggtggtttgtgtgaataagtgggacttgatcgaagataagagccagaaggtgatcgactcgtacacgaccgctatccgcgagcgtctggctccgtttaccgacttcccgatcttgtttatctccgctctgacgaaacaacgtatcctgaaggtgctggagaccgccaaggaggtttacgagaatcgctccaagcgtgtccctacggccaagctgaacgaggtgatgcttccgatcatcgagaattatcctcccccagcatggaagggtaagtatatcaagatcaaatatatcacccagctcccggcgggcagcgtgccttctttcgtgttcttctgtaacttgccgcaatggatcaaggacccgtacaaacgtttccttgagaacaagatccgcgagaactgggattttaccggtacgccgattaatatatttatccgggaaaagtaaatactagatacaaaaaagccgcttcctgtaacggggaggcggctttttctatttagaataggtcggaatgcgttccgatatcggtgaaaagcaagattagctccgtgtcatcttggctccatatcagcagccagtctccttggatatggcattcccacaatcctgcgtatttcccggatagcttatgcgggtggtattgggagggaagggaaccggtatttttgaggatttctacagtctctaataagaggtttatatccaagtgccgcttcttgcaccgcttgatgtcacgttcgaatttggaagtggtatgtacggtataagtcatagctctagcattttttgcttgaatgcctcaaagttctcgtatttgtgtatccttcctgccttcacgtcctccaaggcctcgtccaatccggatttcttctgtgccttcaccttgccttccagcgaagtgatgaatttcttcaagatgtcggcgtatttctcggggatggttacctcgaatgtctttaatgatgtcgttgtctccatatcgctctgttttaggaatttccttcgcaaatatacggaataaaaagagaaggggaattgttttccttctctttttatttcccgcttccgcgtcggggggagggacgtgacggttagatctcgtccgggctctcggagtctccgccgggcgtaggctcgggtgtaggctcgggagcgggcgccggtttcttggcggaggccatgcgctggttgtaggcggcggtggtctcggcgatcagttggttgagggcggcgatgaaggcggtcgctttctcggacggcttcgctacgctatgggactgggccagcagggtgagatcgtcataatacatgtcgatccgcttgcgcaggttggcgccgctttcctttttggaggtggtccggttttggacgcgttgctgcgacaggcggtcgtaggcgttattctctttctccagttcggcgaggtaagcgtcgaggccgagcgtggtgacgtacggcttgttctcgtccttgcgcaaatccagcaagaggccctttatcttggcggtctcctgcgccatggggaggcgggcgatgccgttatagggtttgatgaccttgtataggtacttgcctgcgtcacgctcggcctccagcgggagggtaccggcccgtgagatgcgggtgatgatatagatggcgaggttgtcgcggttggtatcgtgcaaggccatttgctcggtctcctgcgaggtgcggctctcgtccaccacgtcggccatggcgaggaggtctgcctcgtaggtctcgaggaattctttggtgaggcccagctcggggatgccgtcgctgtcggtcagcagggagatctcgtcgggggactcggaatcgccgccaccgctattcccgttggctaggtcgaggacgtggttcatgaaggagaggtactcggcgttgttgaaaagagagagcggaagtgtcttgatttttgtgtaagtactcatggtaaatttgatttagagtttaaaaacttctctaagttagggatatttgctgaataagggcttcttaggcctaaaaaatgggaactgaatggagcgaataatcattttaggcctaaaaaatgacttttcaagggtgaaaataggctttttaggcctaagaaatggtttcgcggccttgaaagtcccttcctaggcctaggaaatcacttttcacggttgaaaaactatcttttagccctaagaagtcatttttcacccttcaagggcatttcttagggctaaaagacattaagaatctgattgttttgcgaatgttttaaaaaaacacgatattcgcgacgtattggaaaaataacgtagaagcgtttcgatattatcttgcattgaaatctggacaatttcaacccaacaagataatgagaaagtagctcctgcgcttgtgcttgttatatacttatcctaaaggtgaattatatgcaatcataaagcgtgggactattgtcttattattgttgggtgggcagtccagagcctcaatgcagtgataagcgatggttctcacgcttcttttatttgttaacctcattttttgggaacaaaatgagcaaagatgagaaaattatgaataaagtgaatctctttaggcgttatctggttggactattgtttctgtctttcttcttccctattaaggccgctatttcttattgggatggccatagttattctacaagctggtatgatcctagtaaatcggtctattacatccaatcagcggaagatttgtgtggattatcttacttgttgcgccctggaagttatgaggattttgagggcaaggaggttatcttaatggtcgatattaatttgaatggttatgaatgggagacgttgggtcgtatagaaggatcttattattatgcatttaatggtgtattcaacggtaatggaaaaactgtctctggtttgaaaataactaaaataaataatggaacaatacgtacaaccggcctgtttggggtcgtgatggagcagggtactattatcaaaaatcttaccgtggaaggtgatattaacataggtagtcgtggaactgcggatattggtgctattgctggaacaagcatggcgaccatttataattgtatatcaaaggttaatatatcagtgaattcatcggatgcctcatcagatatcaatgtgggaggtattgttggaaaagcttatggtatggttcgagattgccagacttatgggaatatccgtataaaccaagatggtatcagtggttgccgagttggaggaattgcggggtcaagcgtgaccgctgatataggagccggaataattcgttgtaaatctgcttctgatattacggtaattggaggaaaagacgcgatggtcggaggtatctcctcgcttattagggaaaataatgaaaataatttgtatacaggatgtgttgatgtcaatggttgtcatttctcctatgtgggtggtattgtcgcttccatgagttcggaagtcaaaaattgtctgatgttaggctcttttaccggatacggcgattattattataagggagcgattatggcaacgcaagaacaaagtgtaatcatagatgattgttattatagagagggattgcctaacgctgcgagttatggatatcctgttgcggaagcagaattatatagtgggtcgtctcttcccggcttcgatcctagtatatggaattttcgtgaaggggaatatcctgatttgttttttgagtttgaggatttgatcgaaatgccagctgtcgatcgtatagaattggataaaacagatttaacattagagattggtgatgctattagattgtatcctacactatatccttcaggagccacaggtaaaatagtgtggagttcatcggatgattatgtagctgtcgtgaattccagcggattagtggtggcaaggaatggaggaataacttatatctcggtaagtatgacggataatttatctatttcagatgtttgtcgtgtgactgtgaataaatcaccaaccgctaatgagagtgttccggttgacgatcttgaagttaggggattggaaggttctatcatgatcaatgcggctatgccgcaagacttttgtatttatgcattaaatggagaaataataaatcaaggaaaacttatgggcggagagaatattatctctgttttaaaaggaatatatattgttaaggtgaagaattatatcaaaaaagtaatagttctttaggatttttctgttaagtaatgctgcggtgtagtctactttaaccttctccactcggatttcttggcgaatggggaaggtttcattatttcgtataatcgttattttttgtaccatatagtggtggctctttcaagcctccaccccattcctgtacaagtaatccggagcgaaatctgccccattgtaccattcgagcgcccagtgggtgagtccgaactggacgaaatttcggaggtctttcaatggctcgaaaagtttcccattcagtaaagggaggaagttcactaatttcaccttgccgttgctaaattccaatcgcatggtatagtccttgacatattccacgccagtgatgcgtattaaatctatatcttcagtcataactttttctcttttaaatgggtcttagggaattttcatcacgaatatatggaataaaaaagataagggtacgagttcgcctctcttttttgtctttctttcatccacatttccttgaaacccttggaatccccatttataatcgtacctttatgtctctttaccttaaaaattaaaaataatcatgtttacgccatcaatgacaaacgaggaaatagaggcagtggcctataaggactttctggagatccggggaagagtggaaatcgcgaaggataaattcgtacaaagggtgagatgcacgcccccgggattttgggccttgcattccttgcaggagacacatacccttcaaacccgctccaagaatacatggactgtatatttctattatttgtacacgacaccggccggtgccgtgaaagtctcatctatgatctacacctccctgccgggagatgaaggcacggattacctgtttatgaataatctcgaccgcttccggctggagagggtgagcttgcgtttctcgcgacaatacgaggaacgctatatcgacccgaaccagatccaactgaacggccttctgcccgccgtctatttcatgaggacggccggcgaccggatgatcgctccctacactcccgatacgtggaccgaggaggagaagaaggacaaatatctcttcgtgtcggagcaagggatcatggaggcgaagctggaggggcgtgtggagacttatcttactttcaggaagccggaacaatcgggtgattaaataagtagagggcgaggttgataccccgcccacccgataactaggtagatacctccgggcttatcttttcagaagatcgatcctctcgctgggcaacagtaccgcatgaaccttctccgttacccgccccttcacgttgaaggaatccctcaggcggatgtcggcggcggaggaaccgatctgcgcctcatatttaccggactctacgacccaatgactggcgctctcgtcgaaggaggccagatccgtatctttcaccttgaagatgatctcacggctctcgcccggctggaggagttgggtcttggcgaaacctctcaactctttcgccggcttatccatgctcttgccgggggcggagatatatagctggaccacttccttcccggctaccgggccattgttcgtgatcgtgcaactgatgctgtagtccgtatcgcccacgaacactttcaagctcgaataattgaaagtagtatacgactgtccgtagccaaacggataggagacgggcacgccgaacgtatcgaagtaacggtagcccacgtagataccctcctcgtagttggtatagtcaatattcttacgatccgtatgctctgggcctcctcccatgaagccggctaacatttctttcaggtcgatacccgaagcgtccgggaaattcttcgtggaggctacgtcggcgatgctcacggggaaagtcatcgggagcttaccggaaggattcacctttccggacaggatatcggctaccgtgttacccccttcctgcccggcttgccaagccaataggatggcgtccggttccgatttccagctggcggtctcgatcacgcctccgatattcaagattacgaccaccttcttcccttccttatggaaagcgtcggaaaccgattggatcaacgctcgctcattctccgtcaggttgaaatctccctcgatcttccggtcttggaactctcccgagctacggcctatcgtaacgaaggcgatatccgcctctttcgccttagcggccagccctgcggcatccggtacgaactccgggatacgagggtggttgaagaaagcggcggcggggctcgtgtctttcggctgtttcgccttttcctcggtactgtatttctcgtataaggctttcacttcggcgtccatggtataaccggcgttttccagaccttccacgagggatacggtataagcctcgttcacgtcgccgctgccggtgcctccggcgataaaatcgtacgaggtggtaccgtaagccgctatcttcttgatacccggggccagcggcaaagcattattcgtattctttaataaaaccataccttcggaagcggacgcacgggttacctcggcgtgagcttttaggtccggtttgtcggaataggcgtattgggcaaagcggggggcttgaaggatcagtcgtaatacacgggttacgtccgtatccacgtcgtcgatagagagagaaccgtcctcaagcgcttttaggagggcctctttctggtccggccgtccgggcatcagcagatcgtttccggcgtggatctgggcgggggcgttcttgccaccaaaccagtcggtcatgacaaggccgctaaaaccccattcgtcacggaggatggtcgttagcaaatcacggctttcggaggcatactcaccatttatcttattgtaggaagacatgaccgtccacgggcttgcctcttttacgaccatctcgaaacctcttaggtaaatctcccgcaaggcacgaggggtgaggcgggtatccgttcccgtccggttggtctcttgattattgacggcgaaatgcttgatggaggttcccacgccattgctttggataccgtttaccatcgctgtcgctatccggcccgtcaagtagggatcttcggaataatactcgaagttacgtccgcagagagggcttcggtggatattcagcgcaggggccaagagtatgtcgcaaccgtattctttcacctcgtcgcccatggcgttgcctacgtttttgaccaatgcggtgttccatgtggaggctagcaaggtagcgaccgggaatgccgtgcaataataggtcgcctcgttcccctcgcgagtcggggagatacgtaatccggcgggaccgtcggccactacgatagcggggattcccagacgttcgatcgggaaggtcgttccggcggctcccggcactatattttgcgtgctgccgactacggctgattggccgccgaacccgggcattccggttccgactaacagggatactttctcttcggcagtcatggcggctacgattttctcgataggatctttacccaattgcggcaaggtttgggagtgccctacttgcatggccatcgtaaggcatgtgcccattaatagtttgttcatatagaatggtttttgtgtttttcagtgccccaaaaataggcgaaggaatcgaggcggacaaagaaaaagaaaggtatcggaggtaaggatttcgttttttgatgaatatcaaacattgtaggggcttgatgatatatttaggggacgcagactgcgtgctctgcgtagtctgcgtcctgtactatttataatgtattcagaagtttatgaatctcattaaccatctgcgtagcggattcttgtgtctcggataaaccttccggagtgatcttggcaaccgtcttgttcaacttctcgagtttgcctttagctcctttcgttgtcagctcttcccggaggatgcggatcttctcgcaatcttgtataccctcgaccaaacgctcgaagcgaatgctactgcgtggaccgggataaatactgtatgtatcgcctgccgcccaagtgcggaaacgcgagtcacgcagaggatcggcggtccagctattaactgcccaacgtagataaccgtcgtaaccaccggctacggcgtgcaagaccgtccatgccgcttccgccgggtcggagaaggtgaaggtattcgggaacgcttccgcgcaacaggtataaacggtactgatctgtcccgctttatcacgggcagcctttacgtcttctgggaatttatgcccatagggaatacttaaatagtataagtccgattgaatttccggatgataatttccggccagcgtgatcttgaactccggatcggcttgcttgataaccttgatcgcctcacgcatcgcctccatcggacgctcgtccatagagatggcggttttctcgaaccagcctttctcgcgaaggtggcgggagaaatcttttaggaaagtaccccaatagtctgcgtaagcggcgtcacccggtttcgtgttgagaaattgtacacgatttgtcgcctcgtcgtaataatcgaaagataaagcccaagggatcatggtgtagcaactgatcatatcatcgataccgatctcgttcatcatgaattccacccatttgtcgaagacggcgtaatcatatgcccaagtgccgtctatcttcttgatccgggtgatcatgctgtcgaaatgatcctcggtctgtccggcccaaggtttatgcatgatactggtggtgatagtgcgctgtccggcgttcgccaacatcttcatgatcgggcgcatagcgtcgaaatgctctttactccaaagaggaacttggtagtaacgggccacggaatacgggttctgccataagtccagatggaaagcccagtccttcggggcgggaagtgtgcggttcaatacgtccacttctatttgtaattccatgggggaggcattttttcccgtgacggtcaatgtccctttatatttaccggctttcgcggattgaggtacccagatattcatccagatcggctgggtggtgcgtgccttgatatcacggatctttacgatatccaatacatcggctacgacggaggaatcccattccgccttattctctcggtggccgcaaccgcctttacggtctttattcaactcatcggtcatgacgtatcggacaaagttcgtcgtgatcgcggaggatgggatgatggaagaaccgctcttcaagtcgctcacggtgatagaggcatcctcgagtcccaccttggtccataacacggcttgtgcgtttacccgttcccctttccatgctttcgtctgccagcgattgcttttcttgacatcgggaatactgagtttcggatatcgtatatcggtcgtgccccagcttaattgggttggggccgataacttgtcccagatctcgtcgctgtcatgcggtttcgtgtcggtcaattccgtatagtcgcctagcgggtatttctcggattgctgggctacggtaaaagaacttagtgccagaaaggcacaaaggatgaaagtgtttttcatacgattgcttattttagaatattaactagggcaaagataggaattagttgacagttgtcaactgtcaactagccttttatagtggcatacgagtagattcccctcatcgtcgtataagtgcatcccgttgccctcgcaataacggaacatcttacaatctgcgcattccccttttttagcccactggcggttacgataaggtttaaactcattattccatatatctatgaacttatccttgtagatattcccttggtggaagttggcccggatactgggacaaccggagatagcgccatcagcgaggacagaggctgtattgataccagcgttgcattggaaaatcgagtctctcacctctgcctcataattcccgaggaaaccctcacagccgtagctaacgtgtatcttaccctctttccggcagaagcggatgaagttcatgacccatgtaaactgctcgttcgtcagttgcaaatccgtctcagtcgcggcacgtccaactgggaagatcgtaaagatacgccaccgttttacgcccatctcgatcaagaaatccttgaagagtatcaaatccttgaagttgcgttggtttacgcaagtcaccacatcccagatgatctccttttcctcggccaacatacagatggcattcagtgccttttcgaaacttttaggattacggcgaagccagttatgcgcttcctcgaaaccatctaggctgatagtcgccgagtgcaatccggaagccaagagcgagtcgagccgttcccgggtcatcagataaccattggagacgatcccccaaggatatcccctgcgatacagttccaacccgcatttctcgatatccttacgaaccagcgcctcgcctccggtaaagatgacgagcactttgttcggctcgacgtaaggcgtgatatcgtctatgactttcaggaagtcttcgacaggcatatccgggacagaggccgagacatggcaatcgctcccgcaatgacggcaggatacattacaacgaagcgtacactcccaaaagagtgtacgcaattcatgtaatttagccctgttcttcttgatacttcgaaaaagctctagggcgatacgttttttgatgtttgggcgtttgtccatattttattcttttttctctttaagtttgatgtcggggatgttaacctccgttttcccatggaaccaagatttacctccctcaaatccttcgatcttgacatctatcgaatccgtctcgaatgatccgttttcaggcccgtcaatatctttagcgataatgcgtacgatgcccattggggaatcctcgaattttatatcgtaacttccgtctttttgggtttggggtgatttatatatttcgcttatatatgagggagataatacgttattatatatgcccccatagttgatctctattccttggatgggatctccgttcatatctgtaacttttcctttcaactcgtattctgcgtaagggctaccatactcatctgtagcgccacaggaagtaacgctgaagcctagtagagaaagaagccccgctaaaatccagttaaaaccttttaatatggaatgatacactgtttccattttctagtttttgcgtgttagttggaagttaatttcttttgatcctttacccattaacatccctttcccttgtgataattcaatttcggcgaaatttacgataatagaatcagttttgcaagcgtttgggtcattccaatacgaagataattttgtgtagatggtatgttcgatagccgtagccttatcgtaggtgaattgatatcgtccggtctcatctgtgatggccggaaagctggaaaggccgtcctcttgagtaggggtatatgccggtgaggttaagattgcgactccggccagcggatagccttgatcatcagttacttttccgtagatcgtgtacaatgcgtaaggttccgtatgtgtatctacatattccttaagtgtgatcttgatttccttagaggcactaccttcgtaccatccatcacctccggtaagttcctcgctgtcgaagattacttgagtcgtatcggatgcgaattgtcctccgttcatttcttcgtctatgtcttccgtgatgaatcggtattttaggatcggaaaatcagttttcttccaatcaaactctccgttagcgtcagtccttacggtatcggtatgcagccatccgtaaggataaattcttgcgtcatttcgattgatacgtatttgggtgttaggtatcggattatcgtttgtatccacgacttttccttttatctgaaaattggcgtaaggagtgccatattcacaaattatgggaccttctccctcgtcgtcagtgcaggagaaacctaaaagcattaataaactcgccaatacgcagttggcttttttcaacaattgcaagtgcatccttttcatggtgtaaattatttttatttacgattctatttatttgatgaatggggcagcaaaatagttgcatgcgaatgcgtaagaaaatgtgatgactttttgtatctttgccacttcaatgtaacagatcaatttatgagagatttcatacgtattttaaagcgtttcgttcccccttacaaaaagtatatggttctgaacatcgtgttcaatgtactttccgctatcttgaacctgttttctttcgccttgattatcccgatccttcagatcttgtttaagatggatgaggggaattacacctttatggattggaattttaacgcgggaagctgggagtcgtggaaagccttgccggagttgatcaaaaataactttttttggtatgtatccgatctgatagaggtacacggcggttcgttcgccttgattatgttgggaatcttcctgatcgtggcgactttcttgaaagtggcgaccatgtatctggctttttatacgatgatcccgattcgaaccggagtcgttcgtgatatccgtaatcagattaacaagaagattacgcagttgccgttgagctttttctccgaggagcgaaaaggggatattatcgcccgtgtatccggagacgtgaacgagattgagacatccataatgagttcattggacatgttattcaagaacccgatcctgatcgtgatctatctggtgggtatgatcgctatcagttggcaacttaccgtattcgtcttgatcctgttgccgttggcgggttacgtaatgggacaagtcggtaagaagttgaaacggaagtccttggaaggacagcaacaatggggatttctgatgagccagatcgaggagacattaggcggacttcgtattatcaaggcttttaacgccgagaagaagatacaagaccgtttcgagcgaagcaatgatactttccgtcggttgacaaaccgtatctatcgccgccaacaaatggcgcacccgatgagcgagtttttgggaaccgttacgatcgctatcgtactttggtatggaggtacgctgatcttgagtgcgaatagcccgatcgacgctcctacgtttatttattatctggttattttctatagcattatcaatcctgcgaaagatctaagtaagtcggtttatgcgatccagaaaggtctggcctccatggaacgtgtcgataagatattgaaggcggagacggatatccatgatccggaacatccgaagaagatcgccttgaaagagaaaatcagttataaagatgtctggtttaaatatcaggaagcttgggtcttgaaaggaatcaatctggatatccggaaaggaacaaccgtggctttggtcggtcaatccggttcgggcaaaagtaccttggtggatctattgcctcgcttttatgatgtgaataaagggaatattcgtattgatgatacggatatccgtgaggccacccttttcgatcttaggggattgatgggaaatgtcaatcaagaggctatcttgtttaacgataccttcttcaacaatatcgcttttggagtggaaggagctacgatggaacaggtggaggaagccgcccgcatcgctaacgctcacgattttatcatagcgagtgagaaaggttacgataccaatataggtgaccgaggtggaaaactgtctggtggacaacgccagcgaatcagtatcgcccgtgcgatcttgaagaatcccccgatcttgatcttggatgaggccacatccgccttggatacggaatccgaacgtttggtacaagaagcgttggagaacttgatgaagaaccgtacgaccgtagtgatcgcccaccgtctctctacgatccgtaacgcagatgagatctgtgtgatgcatgagggtgagatcgtagaacggggcaaacacgaggagttgttggctttggatggctattataaacgactatgtgatatgcaaagcttttagggtgatactgtaacccgggttgcagtggatcgcctcttcggcttttgatggaaaaacaataacaaggaataatcgtatgaatatgaaaggactttatttgattttgttatcgttccttttcggttgtaatttgccggatatgcagaccgggaaggaggtctcatattattttgatcaaccagcgcagatatgggaagaaactttgcctttgggaaacggccgtatcggtatgatgccggatggtggtattgagcgggagaatgttgtcctgaatgagatctccctgtggtccggaagtaagcaagatacggacaatccttatgcgtattattctttggcgaatattcgtcgccttttatttgagggacggaatgacgaggcacaggatttgatgtataaaactttcgtctgcaaagggaccggaagtaatctgggtgacggtgcgaacgctccgtatgggagttaccaattattcggaaatctagtgctgaaatatacgtatccgaatgaatcggattctatcgctgagtatcgcaggcggttgaacctaagcgaggctatcgcttccgtctcttttaaaagggggaatgtgaattatcaacgggaaatgtttacctctttttccggtgatctgggagtgattcatttggtagcggatacggatcgggctttgaatttctcattgggtatgaatcgtccggaacatgcgacgatctctttggacggaaaggacttgctgatgcggggacaactgccggacggggtggatacgttggagatgaaagggatgcgtttcgcctctcgtgtccgtatcgtcttgccgaagggaggagatttggctacgacagatagctgtctgtcggtgcgaagtgcctcggaagcgattatcttggtaagtttaggtacggattatttcgataaagacggcgccggacaatccttggaaaaatacttatcgcaagcggaatctaaggatttctccaccttgcgccgggaacatacacttgcttatcgctccctgttcgatcgggtttctctggatttgggaagaggcgaaagggatcatcttccgatcaatgagcgtttggccgctttcgctcaagataagaacgatccgggattggcggctttatatttccagttcggtcgatatttattgatttcctcgacccggcagggattactgcccccgaatttgcaaggcttgtggtgtaatacgattcatacgccttggaacggggattatcacctaaatattaatttacagatgaatcattggcctgcggaggtcacgaacctctccgagttgcaccttccgctgatcgaatggacgaaactgcaagtccctagcggcgaacgcacggccaaggctttttataacgcacggggatgggttacccatattttaggtaatgtttgggagtttaccgccccgggcgaacatccatcgtggggagcgacgaatacatccgccgcatggctatgcgagcatttgtatacgcattatcagtatacattagataaggcgtatttgagggatgtttatccgacgatgaaaggggctgccctattctttgtggatatgttggtgcaagatccccggactaaatatctggtgacggcacctacgacctctccggagaacgcttataaaatgccaaacggaagtgtcgtgagtatttgtgccggatcgacaatggataatcagatcgtgcgggaattatttacgaataccattgaggccgccgggattttaggcgtggatagcgcgttcgctgctgagttggcggcgaaacgagatcgcttgatgccaacgacgatcggtaaagacggccgtattatggaatggctcgagccgtatgaggaggtagagcctacccatcgtcatgtctctcatttatatgggctttatcccgggaatgagatatcgatagagcatacgccagagttggctgaggcggctcgtaaatccttggaggtccgtggtgatcaaagcacgggctggtcgatggcttggaagattaatttctgggctcgtttacaggatggcgatcatgcttataaattgttgggtgatttgttacgtccttgcgtagatgagcatacgaaggaggtgaagggaggaggttcttatcctaatttgttttgtgcccatcctcctttccaaatcgatggtaattttggaggcacggcgggtatcgcggagatgctgatacagagtcaaaccggattgatcgagtttttgccggctttgccttccgcttggaaaaacggaagctttagcggtttgaaagtccggaatggcggagaggtgtcggctaaatggacggaaggtctgctgacggaagctcgattgaaagcgatcgttccgggtattttccggatcaagcttccggcaaattcagcgaacctaagtctcaagaaaaatcagaaaccagtatctttacccgtaatcgatggaatgctaacggtggatttgcaacaaggagacgaattgatattaataatgtgaataatatgccaatatgccaatgtgccctgcgaatatatccatttaattggcatattggcacattattcaatatagtggtaatctataaatgaaaccgatcgaaaggcgtgcggtgtcgtccagagaggcatcgagcgccttcgctcgttcggataggttatattttttacctatggcggtcaagaagatatgtagattatcatcggccatcggatagaactcaagccctccttgatacccccatgccgtacggtatttacctttctcgtaagcatcgtaggctttatggatcgatgcgctttcatacattcctttcgcgaatagttgccatttgggatggaaacgatactgtatttcccccaccagcgaaagataatcgatgttttgcatacgaaccggtggttccggttcctcctctccggagacttcgggctgggtcaattcggtcaataatcctaatgggtctaattttcctcgtgaatacatgacatcgaaataagcatagaccggtccggcctctatactttgaccggtaaagacgctatacatatatttcccttgggcttgttccgcggcggatacggagtaccgtaaatgaatcaactcatccagaaagttaccgttccagttcaatgtgtaaaacaagggaactctcggtttcttaaatccttccggcagatgtccatactcatcttccatcgatcccatacgactgttcgtcacctgtaagcggatctcttgcgactcattcggctgataccccagcccgattcccgtaaggtagcaaagggagtattcattcatatcgctatactcataaataagcaaaggattctcgtcgtactcaaaaccaccgtagaacacatcttgttttccggcggttaaggtaaaacgctcattcagtttatagccgatatacgcatattcgatcgactcattcaaattctccaaggcttgtccctcataaccgccattcagcgtttggcgataccaatagaataaccgatcgttcacctctccggtaacatcaattttgacatccctgaaacgaaaggcggcttcatccagcttccccgagaaaaagtctgcgttgaatcctgcgtgcatctccaagtccagattgaaaaccttgttgcgtttcggaatcttagtcgcgtattcaaaaagagataccgaagaagaatcccgctccgggataggagaatttgtctgagcgtaagacgttaacgcggaaccgctcaataagaaggccgacagccaagccactgtgagtcgtttcatttactgatgttgattgttaaagtggccgcgaagatacgaattattgctcggttttgcccatatgcttcatgactttagcgtccagatagaaaatgagctcttccgctatattcgtacaatgatctccgaaacgttccattttccggataacaccggccatatataaccctgccaacgcactacctttatgctcctctatatatttggcgataatagcggtagaattatgattgatctcatcgatcaaattatccttcaagaagatacgggaagcgatctctgagctttctttctcaaaagcctctttggtgagtgagatcatgcttaataactccgacagcatttcttctacccgggtttccttgaccagttgcgggtcaatcggttccccctcgggaaggtttccggcgaaacgggcgatgctttcggcgaaatctcccagacgctctaggtttgtattaatcttatacatcgccaatacgaaacgtaggtcgatcgctaccggcgcatataaagcgatgatatcctcgcaatcactgtcgatctttagctcgaaagcgtttacccggcgttcccggctgattaccttataagcgagttccttatctccggtaagcatagcctcccctgcgttgtataattgctggtgaaccaatgcccacatctcgctgatactattttttaaagaatgaatctcctgctctataaccttcatactcttctaattttcaatttttaattttcaattacccaaaccgtccggtaatgtaattctgtgtagactctttctccggattggtgaaaatcttccgggtattatcatattcaatcaattcccctaaatagaaatatccggtcttgtcgctaacacgagccgcttgttgcatattatgggtaacgattacgatcgtataatcatttttcagctcatgtatcaaatcctcgatcttgctggttgaaatcgggtccaatgcggaagtcggctcatccattaataggatggagggcgagatcgccaaggcacgggcgatacataaacgttgttgctgtccgccggaaagagcgaatgccgattctttcagtttatcctttacctcgtcccaaaggacgacctgctttaaagtcttgaccaccgtctcctcaatataattctcatcgttgacaccgtttacccgcaggccataagcgacattctcataaatcgtcttaggaaaaggattcggtttctggaaaaccatccccacgtttttacgtaagcgatccactctctcgcttttcgtataaatatcccttccatcaatcaggatctgaccttccatgcgagtgtccggaatcaaatcattcatgcggttgaacaggcggaggaaagtagactttccgcaaccggacggtcctatgaaagcggtggacgtattcggctctatctccatggaaatgttcttcaatgcatggaaatccccataataaaagtctacgtttttagcatcaatctttatcataattgtcttatttttttaattcatttttaccttcttggcgaaataactacgtaaagcgttcgctaaaaggtttactaataatacgatgacgatcagcacgagcgccgtgccataagccatcccccgggaagcctcgatatctgtaccgcttgtagagataacatataagtggtaaggtaatgccatacattggtcgaaaatacttttcggcaattgcggcaagaaataagcggccaccgtaaaaaggataggagcggtctctccggacacacgcccgatcgaaagaatcaatcccgtaataatattggggaacgccatcggtagcacgaccctgcggatggtctgcaacttcgtagcccctaacgctaggctaccgtgacggaaagaatcatcgatacttttcaaagcctcttccgtcgtgcggatgataagtggcaaggacatcagcgccaaggtaaacgaacccgctataatagagtctccccatcccaaggtacttacgaatagagacataccaaataacccgaaaacaacggatgggacaccgcttaggttattcgtcatgatacggatgaaacggatgagtttcccgtttgtggcgtactcgttcatatagataccactcatgatgccgatgggaaaactaatcaagctacttccgatcactaaatagagtgtacctacgatagccggaaaaatccccccggaggtcatgccctcttggggtgcttgtgtcaggaaatcccaactgatcacgctcgctccctttaagataatgaatcccagtattacgaataagatcactacgaccaaataactcaggaaagaaaagaaaccgaaagcaacctgttgagaggcccgtttcctcttgtctatattccctaaatgttgaataggtgccatatctttaattaaattttacgtttggatgaaatatattctacggcgatgctcaaccccaaggtgatgaggaacaacacggctcccagcataaacaaggcttggtaatgcgctccacctgcgggagcctcacctaattccgctgctatcgtggcaggaattgtccgtaccggttcgaagaacgaggtagggataacggcggcgtttccggttaccatcaatacggccatcgtctcaccgatcgcacgtcctatacctaatacgacagcggacgtgataccggatatggagtaggggattattactttgtagatggtttgccattgcgtggctcccaatgccaagctggcctctttcatggctcgtggggtagttcgcatggcatcttccgctaccgtgatgatggtcggcaacgccatgatcgctaaaaccacgcttccggcgaaagcggtctcgcctaccggaaggtctaaggtcttttggataaggggaacgatcaccaccaatccgaagaaaccataaacgactgagggaatacctgccaataactcgataataggctttagcaaattacgggtttttgtattggcaatctctgccatatagatcgctaccgctactccgaaggggagggataaggcgatcgcacctatacttactaaaagtgtgcctagtaatagagggatcaagccaaagatcggagcgggagcggaggtaggataccatttcgtccctccaaagaactccgaaggtttgatcgtggctcccgatatgatttttcccgtaaagttctccgacttgtattgttccggaaagaatgcgataatccccggctctttatggataagttcattgattttctcgggaacatattgaaattcttcacctagctcttcttccgtataatagttggttaggtccgagaaacggaagacaagtatatcttgattttctccgtttaaatcttcccaattggtgatattggcatcgaagacatccatgatttgctcgggagacaaatgttcgactggattttcctgattcacagccaatatatatccttcctctacctccgggctgttaaaaagacctgcggcctctttaaataagaagacaatgatcaacaagatcgtaaagctactgacgcttccactgatcaagaatcctccttccactaatttttctataaactttctcacaatctttgcctatttattctgctgcaaagaaagagcctctatattaaggagagattaaacccgcttgaaagaattgtttcaaaattattacaaatgtattacgcattgtctgctatgagaatagggcatgagttcggttgaacccatgccctatgaattatgcctgtaatatgtttgtattacttattatacttgttccaatccacattgtgcatatcgccgctggccgctagttcctcatggaaagcgaaacagcatttcaggttttgaggcgtatgtcccttgatacccatagcgaggtattcttccaataacggtttgtaatccggatgaacacaattgtcgatgatgcaacgagcgcgttggatcggagatttaccgcgtaagtccgctacaccatattccgtgataatgatcttcacggagtgctcgctatgatccaagtgagataccatcggtacgaacgcgctgatcttaccctccttcgctgtagacggagtcgtgaagatcgataacatagccgaacgggtaaagtcgccggaaccaccgataccattcatcatacgagtaccggatacgtgcgtagagttaatattaccgaagatatcagcctccaaagccgtattgatagcaatcaagcctaaacggcgggcaacctccggattgttagagatctcttgcggacgaagcaatatcttatccttgaagaaatcgagatttgcgtagatctcacggattacctcattacttacggacaaagagcaaccgctggcgaatttaacgcgaccttgtttcatcaattcgataaccgcatcttgaataacctcagtatatacattgaatgcggggatagactcattagctcccatgcagcccaagactgcgttagccacgttacctacaccactctgcaatggaacgaattctttcggaagacggccggccttgatctcgctaaccaagaagtccgcaacgtttttaccgatcgccatcgtaacatcatccagcggagagaattttccaccttcattcggctcatcggttcttaccacaccaacgatcttagccgggtctacttttacacaatcgttaccgatcctgtcagaaggagtgtagatagggatctcacggcgtaaaggaggatcagccggctcgtaaatatcatgcataccgcggatttctttcgggtgacggcagttcaactcaacgatgatacggtctgccatacgacagatagtaggtaagataccaacacctgaagtcggaacgatctcaccatcctcagtaacatcggcagcctctacgattgcgacatcaatcttacccaagaatccgtaacgcaagctttgtgccaattcagacaagtgcaaatcgaaatattgtgcctgatgagcgtttaatgcggcacgtaagtctttgttagattggtacggtgtacggaatttgatggcgttagcgcgagccaactctccgtctagcttatcaccagtagaagcgccggtaaacataccgatttgaaaagggttacctttagcgtgttcttccgctgccttccgggcgatagctccgggaacgactttcgggcatcctgcgggtgtaaaaccactgaaaccgacattgtcattatgatgcacataagatgcggcttcttcagctgtaataaattttaatgccatgataattagtttttatgtttttaggtaaatacttactgttcaatatttcgggcgcaaacttacataaaattacgctgaatcgaatataagtgtggcgtaaattaatacttccggtttagaatctccgcacaaatgatcgctttcttcaattcctcgatgtctctgaaggtatcttctggcataagccccggttcttcctcgatagcactcatccttacggatggctgggtcgcgatatgattcgggatattcttctcggcggaaaggaatggagatgaggcaggcgatgaggttacgacttgcggtttctcaacctttgactttacctgcttttgtcggggagcgggcttaggtttttgcgtttccttttgcatatcctccaatatctcccagaagccttttccttctgtaggctggtcattaggcacaatttccctgtcgggttgccccaatatatcggggcgactcttcttctttttgtctttcgaactgaataagccactgacggcggcgataatcaggaaaacaatatataaccaatctcctacgttatccataaactttgattatttttgcacctccaaatgtaagaagaataattgagaagtgaaaagatgggagtatataaaacatcagataggtataaaagtaaataagggtaacttcacagccacccttattcgatttaaccaaaaccttaactatgaaaaaatttacgtttttcgaatgcaaatataacggtgggattcgaactatgcaagcgtttgcgtaattatttttaagaatcttgcttatttaaattatattaacatatagtatggtaaatcaagaaaacggtgtggacttaaaatccgctacccaaagcgatgaacgaaagttgtttatcgagacctacggctgtcagatgaatgtggcggacagcgaagttgtagcttctatcatgaagatggatggctatagtatgacggagaatatcgaggaggcggatgccatcttcgtgaatacttgctccgtacgcgacaacgccgaacagaaaatctatgggcggctacagtatttccagtctttaaaacggaaaaagaagtccttaattgtcggtgtattgggatgtatggccgaacgagtgaaggaagatctgatccatgtgcatcatgccgacttggtggtaggaccggattcttatctggacttgccgaacttggtgggagcggtagagcacggagagaaagcgatcaacgtggagctttctacccaagagacctataaggatgttatccctttgaagttaccgggtgtacatatctccggtttcgtgtctattatgcgcggttgtaataatttctgtacgtattgcatcgtaccttatacaagaggacgcgagcgtagccgggatatcgagagtatcttgaatgagatacgggatatgcacgagaaaggctttaaggaagttacgttgttgggacaaaatgtaaactcctattctttcgagaaagaaggtgagatcataaccttcccgatcttgttggatcgtgtggcgaaagaggttcccgatatgcgaattcgttttacgacctcccatccgaaggacatgagcgatgataccttacgtgtgattgccgcaaacgacaatatctgtaagtttatccatctgcctgcccaatccggcagcagtcgcatcttgaaggtcatgaatcgtaaatatactcgtgaatggtatctggaccgtatagcggcgatccgtcgtatcgtaccggattgcgctatctcgactgatttattctgcggtttccattccgagaccgaggaggattatcaagagactttatccttgatgcgtgaagtgggatatgatagtgctttcttatttaaatattccgaacgtccgggtacatatgccgctagccatttggaggataatgtgccggaagaagagaaggtacgtcgtttgcaaggtatgatcgatttgcaaaataagttgtccgaggaaagtaacttgcgggatataggcaagactttcgaggttctgatagaaggattctcgaaacgttcccgtgagcagttgttcggacgaaccagccaaaacaaggtggtcatctttgataagaagaactatcatgtaggtcaattcataaaagtcaagatccataaggcttcctcggctaccctgttcggggaacctgtggaggaataagaaaaagaaaacgccaatacgttccatttcgagcgatattggcgtttctcttattatcttctatctttggaatatctccgggtatttgttgatgaaataaaccggcgtgcaactccatgcgtggcaataactattgatcgggaaaaatccgtaaggtgataattcgtcattgttcggatcatatacctcccagaatgtatcggctcctttattcaccatgccgccccaataactggttaagagcgaacgggcctcttgccgcattccacatttcaacaaggcttccattacataatgataagcgtacggacatcccggatagcatgcgtcgggcatcgataggacggtggccatcgcttttgctccttccttggcggtaagcgtctccgataggatcatccacacttgtgataggtaagacacctgacggttagggccgcttacgatcaccccgttcttttggtcatagaatgttttccgggcggctttctttatctggccggcgatacgaggccaatctctagcctccttctcttttcccagcattttagctagctcatagcttttctctaatgagaatgccgtaagtccctgcatagatgcttggcgatcataattatctttccagtcgaataccaaccaataaatcggttttttttgcatatcgtagatccaatcgtccgagtattgacgcaaggccatctctatttggcggaccactaccggccataagtccaaggcgacctccttatctccggtctctttcaggtattccagcaacgctacgttatacagcagggaatagtccaagcaatgcgtaccgttttgcggatgaggggtcggtgtctccaatacggtggcgtgcagcagtccttcatcattggctagagccgctaataaatagaggcaacgtttcgtcaagtcgtggtttttatacgaccatgcgttcgctagcgcctccagatacaagtctccgatccataaccggcgatcccgtttcgggccatcctcatagacggtctgcatacattcttttaatgtaagcaatcctacctcattgattttacggatcaagggatcggtcgtggaagccagtggcaatggagccgtcttagccgatgtctgcgcacggaacgttagcttgtcgaaggcgaaatcgaaactggaagcgcctagcaactctatcttgagataccgaaaagacacccttctggggatggaggcctcgatgggtacggtcattaacgtcatcacctcatcttgtagccaagcccttgacagaccgcccggataagggtcgaaaggcgtgttcaattccgagggaacttcggcgaacgtgaatttgatacgtaccggagcgtccgaaacctgttggctaaggagcttgagcgagaaatccaaataacccgtcagatgctcaccgaagtcaactataaccgatggatgtttcttcagggactcattgaataacagatccgtgcttccttcgtcccgcatgcgccaaccttggtaggctgacgcatctttgatggaagtgacccgtttgaccggcttatgttccgtataggttaacactggcttgcaggcctcactcttttgaagccatgaagcgctttctttgaaataacgactttgtgctgatagggtgaatacaccgacacagcatagtaaacttagcaggattttcatatgtgttcttttcatgatgcgaatataagaataacttcgttaatatccgggattttgtttaagctcgctgttcaagtcgatttctcgcagaggtatgggcaacaagcatttatctgggttgaacagataagcgttcgccacgggttgaacaccgtcgggccaataataagattcgggatttgcctttatcttttgtccatgtcgtgtcatgacttccacggctcgtcccgttctcagaaggtctgtccagcgtttgttctcgaatgccagctcgatccgtctctcttggtagattgcctctctcaacgcatctacattctgggatttgacaggagctaatcccgcccttccccggatacttgcttgcccgaaggtgtcattcagataatggatagcctcgtccggcctattctgctcgttgatagcttccgccagaaagagcaatacctccgcgtacctgtagaccggccagttgtcatccgtgtaatagggctttatatgctcatgaaaatattttttgataaaaggataagcggttattcccggagctggctcatagtcaactatacttttcacgccggtagcgtcgagggcgtagctatcggtgagcttaccttccaccataccgatggatgcgtccaaccgtttgtctcccttttcgtatgcgttgattagatcgatcgtaggggtgttaaacccaccatggtctacgttggaaggacaaggattaggggttgttcccgtgatggcagacggattcgtcatatagggcaagaatctgtatatgaaatcactttgttgtcctaatgaggcgtcttgcatgtattggatctcgaagatagattccttatggttcttgttcgagatggaatagatggagccgtaatccgctaataactcatactcgcctgaggataccacctctttcagcgtttgttctgcttccgcccatcgttttagttccatgtatacgtttcccaataaggtctgtgcggagcctttggaaactcttcctacctcttgccttgattttacaggtaggagatcactggcttcttgtgcgtctttcatgatttgctcatatacttcgtctacgctcgcacggggtttaaatgcctcctcatacacggtagagggtgtcgtatgcagaggtacgccgccaaagtattgtactaggttgaaatagcagaatgcccgaaggaacaaagcttgtcctttgaggttgctttttgcttctgcgtcaaaatccgcttggtctatttctgagataatccggttacatcgtccgatgattacgtagcagttattatacttcgtaccgacattaccattggtggatgtctcaaggaactgatccggatcttctccgtctaaggatgatttggcgatatggatgatatacgtcgtattatccgatttggcctctcccagattccactcttccgtgttgtacatgttccgtaaaggttcgtaagctccatttacggcttgcctgaaatcctcctcgttctggtagaagttctcggcggtgatctcgctatacggcgtaagattcaagaaatcactacaggaggcacaactacatcctaaagcgatgcttatggctatattgaatatcgttttcatatatttcgtataattagatagttagaagttaacatttaaacccagcgtaatggtccgtggaacgggataggtggtataatcgaatccttgttgcaagctattcgccgttgttcccgtattgctgatattcacctcgggattagcgccgatgtagctagtgaacgtatatacgttctggaaactgacgtaagctcgtaatcctttaatgatatcccggtttcttaacggaacttggtagcctaaggtgatattcttgattgtcaagtagtttccgttataaaggaaacgggaactgaaccagtcacgttctggtgccgtggtacccatcttggtcgttccataacggccgttacccggattctccggtgatttccagcgattgtctaccgctttatacacgttgaacacaccatccagatttccagcgaactgatctaccatattggctaactcaaaaccaaaaccgccggatacgacaattgacaaatcgaaattcttgtaggtgaacgagtttgtcatgcctactatccataaagggaccggattgccgatgatatcgcggtcatccccttgggtaactttgccatccccgttcacatccttgaagcgaatggttccgacatcggcttgtgcgtgtttcgggtatttgtcgaattcttccttgttcttgtagaccccttcccatactaagccgtaaaactgtccgatccgttccccgacttgcgtgatgttgttaccgatgatcggggcgtcatctacacccagttgcaagcatttattgtcattgtaagatatgttcaggtcggtagtccattgtaatttgcctgtcaggttcttggaggatacgcttaattcatgtccccagaacttcagtttgcctgcgttcgactggatgttgtagaagccggaagagatcggtacctctagcgagaacagcagggcgtccgttcgcttgctatagtaatcgtacatgatggataagcgattattgaagaaaccgacatccagaccgacatcgacttgcttattcctttcccagcccagattcgggtttcccattcccgagatgcttctgccgctggccaaggcgttattgaagttgctgttcgtggtggtgatcgtcgccaaatgcgtatagttaccgatctggtcgtttcccacgataccgtaactgatacgggccttgaggaaagagatcgttttctccaatggtttcatgaactcctcgtccgagagtatccagcccgccgatacggatggaaaattaccccaacgattgttcttaccgaaacgggaggaaccatccctacgcatcgctgcgcttaaaaggtactttcctttgtaattatagtttatacggccgatataggataaaagggaccattcgtttatgtttccatccgccgtgatggtaggggcggcattgaatgtcgatattttatcgtcgggaaagttcgttccggtcaccatcgtatattcgctatggtatttttgtgcggatatgccgaacaggagatcaaaggaatgatcttttatctgcttgctgtaggtggcggtattctcccacagccaagtgtagaatagattattggattccttcgcctcggggatctgatagggagccttatagatctctccggaggtggagggcttgaacgagttccatttattctgtgtcaagtccgcgttgatgctggtctttacttttaaatctttgaccggctctacctccaagaaggcgtttgcgatcagatgggtgttctgggtcttgttcttgttgaggcgaaccacattataccagttcgggttatcgaacaatcccggcccactggccacaagcggaatactgccatcctcattcttatagggtgcgagaggtgttgtcaacatagctccttgcaggatggaacctttatcttccgtccagttaccgtccgattgcgggctattattgatggagaagctaggcgctaggttcacgcctaccttgacgatcttcgagaatacgtattccgtattggctcgtgcggagaaccgttggtaattagagtttgtcaacactccgtcttggttgaaatagctggctacggtggatgatttaaacttcccgtctccgttgctgtacgacaaactgtaattctggatagcggcgggacggaataatacgtcataccaatccgtgcctttacccagcgcttcgggatgctggtaagcgggatcgaccgccaatccgttctcttcagcgatctctttcctgaaccgtgcgtattcggaggcatccatcatatccggcctccctttctcgggtacgtattgtatgcctccatatacgtcgacgcttagttttttccctgattgggcagtctttgtctgtatcaatacgactccattggcagcccgggaaccgtaaagtgatgtggcagaagcgtcttttagcacactgatactttctatctcgtctggattgatcgtgctgatatcgcccacgataggcattccatccactacataaaggggcgtggttcctccggacagtgacgcttgtcccctgattcgcatggtcattccttgtccgggtttaccggatacttgattgatttggacaccggcgaacttgccttgcatcttttgcgagatctgggctacgggcatatccgccatctcttccgacttgatggattgcacggagccggttaccgcccgcttgatctgtgttccgtacccgactactaccacttcatcgagcttctgcgtgtcttcccgcagctgtaccttgatatgattctctcctgcgccgaccataacgtccttgctgttatagccgataaaagatacttgcagggtttcaccatccgataattcgatcgagaatttaccatctagatccgtgattgtcccattattggtacctttcaccactacgttcgccccgatgatagactctccgttggcgtcaagcacgacacctgtcacttttcttgttctctgttgagttacggaatcatcattctgctccgtatacgggttctcttgtgatggatttgtagcgatagccaatgccggcgatacgcagaggaagagcaaagacaatgatcccatcgccacattccaagttctcattttacttttcatacttttcatttgttcataattgaatagataatgttaactacatacgataagtctgatagattcagattaactaatacattattagatatactccataggctatatgttataaagttattaagtaccgtaggaactcaatggttaatttatgtataggatattagaggagagtggtttaggattgattgcggatctgttatgtcatttatctaacaagaaatgtcatttttgtaaccatttgattcttattacttcccatctttgccatatcgaaagagagagatagtaaggatttagttcctacggaactgtggttttttcttgcgtattattttatagtacacgtacgtaaattatgtttatagcttcccttttcataatagcgacagcttaccttgatttttattagccgttcttttgggttcttaatgcattgtactgatatttttctggagtggtaccttgagtatgaaatgaaagaactaaatcatctaccatatctgccattatctatataagtatctaattataagaaatttgttgaatggtggtagataataaacatctaccactatcagcttgcatctaccactatttactgcttttcaaccactaaatgcagccgttcactattcgctaaccacattactcgttctgcgagggtatgccaacaggttgcctgcttggttatttgtataccttgtgtattgatttaaaacattgaataataggtatttatagttttaaaggcataaaacaaaagttttcatagcggaaaacttttggttcgtgcttatgaaactttagttttccttagaagaaactatttgttcgcctaagggaaactcttattaaccctgttgctttgcccatcgatgtcttttaaaaataacacgttttctcatccaatgcaaagaaaaagtatcaatgttaagtataagtggtagatgttgaatgataattgtagatgtcaggctttctacaacctataggtaatgatttgatttataaagtatacatggcgtagtggtagatattgcagatgttttcataaaatcaatattgtagaattccttttatctcaattatgatagttgcagtctgatatttggctcgttatgctattccacatgctttaagaagagaatcttatagcttgtgatgatataaagtttttatggtagaaaattttgtttacgtaaaaatatttgatctataagtattctgtaatagataaaaacgcctagtctaaacgatcgtttattctaggcgttaaagataggctatatttttgaataaaacaaaatccagagaaacttttaaaatttgattatcaacgcataaacgtaaatatggacgcttatgcgttgaattcaataaaacgccagaataaaatgatcgtttagactagtcgttttataaccgatgatttcgcataactgcttgtaaatgatgattatgagaagactgatatgcaggaaactacagagtttatgaatatagggtaaatgttttaaataattgaatattaataacttataaaaattaatcgtatgaaaagaagactactttttttgttcgccgtctttatggtgggtgcaagtgtggggtggggacaaatgatccctacatactacaaagtggctgtaggaacagatggtgatggatcatcagctggttcaccaatctacaagacaaacttggaaacagcattgtctgatgcggcatcatcctcattggatagtgtgatcatattgttacctgaaggggaatactcggctaatgcagctccttattctatcaccaaatcatcattggctatcattggtgaaggtgatacctcaacagttacaattaagtctccggtagatattgagctaacaaacggagggaatgtgtctttccaaaaggtacatctaacagtgaaaacatcgactggacgaggagttgtcgatattaaatcctctaaaacgacagtgtctttcagtgagagtaagataacgatagagggtcggggaacgggtgatagtggttccggggcttgttttggtatagtgtctcaattaactgtaaatgagaataccgtaaactttatcaactcccgtatgtatatgtctgagggttttgaaagaggacttgcatttcgtgatggtggaggccatactctcaattttataggaagtaagatggaggggccttcggctaaaggtttatatccttacgtgatcggcatttgctcatgggtgggaggaactgataatactaatccggtaacttataatataaggaattctgtagtagatgtgaattattatgcaatattcgctatcaaccaagcggggtacacaaatgccgtaaatataactatcgacaattccagtgtaactgcttgggccgcactttttctaagaggtgatttagtaaatgaaacctacccgcataatgtagcgatctctaatactcatttgtatggacgttcttaccaaaatgggccaagtgatggatttggaactgtcgttttggataattgtcagaatttgactatgacgatggactctaaaagttctatcgtttcagagaataaagcaccgatagatagccccatcacctatatgtgtgtggctgatgtccgtaagaatacttccggtacttggacgtttacatccaccgatggctctaaggctttaatccaatccaagaatgacaaatatgctcctacattattttttgatgatgcaggaacaaatttggaggttttaggggttgaaaatgttgagtttaaggctgaaaacgagaagccttgcattgtctcgattcataagaacgggactttgaacaatgcggcatccagtttagacgtattattgacgaatacgactttagaggagggggataaagtgattttcccggaaggagaatatactttaccaatgacgctgcctctggataaatcaatcacgcttcaaggagctgggcaaagtcagacaattgtaaatggacatattttcgttaattcaccatccaccggttcagttacattgaccgcaagcgacatgaccttaaaaggaacagataattcctctgcgcatgggcttattggcatgattggaacgggcaagaatatcgtaaagttaaccaattgtaagttagatggtggtgcggttaccgctcaaaccgctgccgtaggtgtccgtatggaatcagtgggagcggagttaagcttgacgaatacggatatcgatgtcaattattatggaataggcttacggaataaagagcaagtcttagatattacgggaggaacctttaccgcatggggggcgatcatgacatcagccggaagtatgagtccaagtgatggtacattagctaatacgaatacccggataacggcgaaagacgcgacattcatcagtaggactcttctgaatgggaaaagcaatagttatggagctgttattcttcaggaaaaatacaacggagttacagctgatttcacgaattgcgagttgcgagcggtagatggattagatcctttgataaatgctacccaagctacggctacggatatacgttcgtatggaaatacgatcacatttacaggttgtacgttgtcttctttggaaggaacgaataatctcccggatggaagtaacggatatttacatgccggagttattcggctaggttggagtggaacggatgataagtcggaatttgcggataatacgataacgatcaacaattctacattgaatggcaaggagggagagaactgggtctattcacatcgcgaaaaggaggcgaaaaaatacgacaagctgacgatcaatggaactgtttatgatccggcctcgggtcttatttgttatggagagccagatattcagaataagattgataatgcggtagcgggagagacgatttctgttccggcgggagaacatgcgggtttcaatgtcactaccgctgatgtccggataaagggagtttatggaaaaacgattattaaaggaacgaagaagtatacgggttcttccatagcttgtatctctgcggataaggtgactttgatgaatctttctttcaagagttcaacggatggctcgaatcgtccaacagcattgtttgtcggtggaggtacggtggagattgatagttgtatttttgaggataagctactccaaacaggtttatattcggaaccgggtagtactcttaaagatgcgaccttgttggttcataacagtacttttaatgtatatgataagaatttgttgatctcagcgggacgacttaacgctatggtcaagaataatgtttttacggatagtgatatttcggtagcgaagaatgacggctcgaatgtcgttgaatcaaatgagtttcataattgtgtcgtgaaagttgaggatggtgtaacattccaatataataagatgtacccgggcgaccagacatatgtatattccattcgtcccaataatttagagggaacggttgttgcgccgaataattattggggaagtgataatccggatttttctgccttgattgataaaagcagggcaccgaacggatctgtagattatttcccatattattcggatgtcgctttgggtaccttaatctataagatggtaacgatttcggaagatacggtctgggccactccgcatccaaatcaaaaggtcaccgtcttggatggcgcgactttgacgttgtctgttccaatgtctttagataccgttaccatgagagaaggtgcgcaaataaagtcaaatcttgcggatcaaacaggaagcgtgaccactaagtctcttcgtttctctccggatctctccggtactgagtggaaggcgttaggagtgccattagcctctgccgtgatcaagaactctacggaggaggagatctcggctccaagtgttcaaaatgttgataatggtatctggttcgctaggctgaaggataacaagactccggagttcgtggtggatgagagtgcttttggcatggctggtctttgggcggctaatggcgatacctatacgatctcttctgaaggagcttttgaattcaagaccttggaagaacctgccgctccaactgaaacaggtactttcttgatgtgctcgaatccgaatacatttacgattaccttgaaacaatctgcttatatattgacaacggatggaacctctttcgagcaagaggcaaatccggagatcaagcctttccaaagctttgtcttgacagacgccaagacattgagtacgcttcgctctttacgtatcggcgatggcgtggttacgggcaaccagacgatcgagccggtagatggttattacgtgactaccgatcgtggcgctatcgtgattcacacgccggagcctatggacgtggtggttatcagaatgaatggcaaggtcgcttatcgtggcgaggttacggacggacagcggatcatggtttcttcgggcatctatgccgtgaacggtcaattagtaagggttaaataacgattaaaacaaagataaacatgaaaaagagtatattagcgatattccttgctgtcattgcgatggcacaggtacatgcgcaagattcagatttacgttccgccccggatcttccgacgttcaaggtgacattgaattatagctcggcgaatacggatcaaggaaccataatcagtacggtagccacaggttccaaggtggcatataatagtaaacccgttttcacgatcacggcgaagcccggatatgtcctgtcggatataacgatgaatacggctactattggcacgttgccgagcggtacttttcaaaatgataatacgaccacctattcctatacttccaccgctttgaccggtagtacggaaatcaaggcggtgttcaaggcaaaagagcaggtgacagtcacgatctctcctgagtatgccaccttggatgagataagggcgaaggtgaatttgcccaaggttacttttgacccggttattacggggtataaagtacaatacagggaggatggctctgctgctttgacggatgagttacccgaaaaggctggactttattatgttgtcgtaaccaagtcggagactgatacgcaagccgccataaacaaggagattctattcaaggtacaaccgccccatacgctttcttactcgtttgaggaggcgcaaggatctgtaaccgcttctatggatggctccattatcgccagtggtgatgagatcgtttataataagccagccgtattgaagattgcctccaagcccggttatgtgttgagcagacttaccgtagataataatgaggtgactttgccgaaaggaacttttaattcttctacgaatgagacttcctacgcagattatacgacatcggcgttgaccgcttctacggttattgacgtgcgatttgccgcgaagaaaaccgtatctgtaacagccaatccattatctgccacgaaggatgaggttttggctggtaagaatcttccggttattacattttcccccaatacgatagcggggcagaaggttcaatataagaacgcttccggagctttatccgataaacttcctgcggcggatggtgtttacacggtcgtcgcgaccagtcccgagactgcggaatatgccgccttgaaggatgagaacatgaagttcacggtatctaaagcgaatgtattaaattataacgtggaaacggccggacaaggtacggttaccgccaagatgggctctacggacatggcaagcggtagcgagatcattaacggccaacctgccgtatttacaattatcgctaaccccggatttctattgaataagattgttgtgaatggaactgcggtatcagccttgccaaaaggtgcgcttaataaggataacaccatctcttatacctatacgaccgcctcgttaaccgcctctacgaccttgtcggtaggtttcgccgcgaagaaaacgatttccgtgagtgtaacaggttcttcggcgacaaaagacgagatcgtggccgggaagaatttgccggttattaagtttacgccggaaatagcgggacaagcggttcgatatcgtgcggccgatggttcggagacttccacgttaccgcagatagtcggagcttataagattgtcttatttagtccggagaccatggagtatgctgcgttagaggattcctctaaaacgtttacgatccgtaatgccaataccttggcttacgctgtcgatggtggacagggtacggttaccgccaagatgaacaacaaggacatcatgagcggtggtgagatcgcttacggtaagcccgtcattttctcgatcgtatcgaatgccaactataggctaggggctattaagcaagcctcttcggacgtggatatctcgaagatcaagggaacgtatgctaatggaaatacctcttacacgtacacgactcctaatctgatgagtggcgatagctatacttttgcgttcgtctccaaggatacggtgaggttcgtggctaacaaccttgtccagacggttggctccatcaagccggtcacggtaacaagtgctgtcgggggtatcaagatcgaatatcaattgagcggtacggcttgggttacgacattgccttccacgctggctgtgggttcttataaggcccgtttgagccgtgcggaggacttgacataccgtagcctctctgatacggttacgttagtggtggagagcaagaaagaggtggagagtttggtgttacctactccgggtcgtattgaggaaggacaggctttatcggcgtgtaccttgatcgatggaacttcttccggatcatttatctggaaaactccgaacgagatcgcttctccggataagaaaaagtatgacttgatattcgaaccgaatgatcctgttctctatgcggctaaagatacgtttataaccttgaacgtaattcctgtttattctatgaatgttaccgccggtaatttcggtactgtcatcttggaggggcgtaccgcaaatgataaatacgcgagaggctcggttttgaaagcgacagccgtcgcagataagaattaccggtttgccggctggagtgatgggaatacatcggctacacgggagttgcaagcgaatgcgaacttggatatcgtagcccgttttgatccagtcctttatggcgtgacgtttacggatccgatgaatggttccttgaaggtctttgcgaatggcgtggaggtgaagaatggtgctgagtttttgcagggaaccttattgactatcacggcgactccggatccgggctatatggttcagtccgtgaaggtgaacggggctttggtgaataacggttcttatactttgatacaagccgctgatatatcggccgatttccttcaaaaagaaccggataaacatttggtaaaggttggggagttgaagaatggtagcgtgaatctgatcgaggtggatacgaaggcacccgttactcccggtgaggctatctctgaaggtgtgaaagtgaaggtgataggaaatgcggattatggctatgaactggcttccgtgagagtggtaggtgcgaattataatgagactgatgactcatttacggttggaaccggagatgttacggtgaacgcgagtttccagttgatggaatatcaaataacctcggcgttgagtattcccaatgcgggtaaggtcgtgttgaaagacaaggcaggtaaagaggtggcttctggttctaaggttccttatatgactcaattgaccgcttctgttgagacggaaacgggatatcgttttatgaatatgatggtgaactcttccgagatcaaggatggagatgtattcaccgtttccggccctatggttgttaccgctaattatgtggagaagaaagacttggcctcgctgattgataagacgacgcaaacggtagtctataataagcaataccggaatttcgagattaagattacgggctattccggtttggactttaaggtcgcatattcccggagtggagtagaaatgacagagaatcctaaatcggccggaacttataaagttcggattacccgtggcgaggatgatttatttaaagccgtggatgtaactgccgagctgattatcaagaaggctggtatggcattgctggaagtaccgactataggaggggataattatgaaaaggttgatgctaaacttactcaagacttcgaggatgtggaatggaatccttctacacaaaaatcggcgcttcgtgcgaacgtgactggaagcccgacaaaggatcaggtaaatattctgcgctttaccccacttgacaagagtaattatgaatcggtagattattcaatgccggttggtgaagtaaaaacgttttctttaagtacttcaaatacggaggttacgaatggaggcttggttattagcgattattcggaagttccggagaatacggttttaaagttgcgagcggtagctcctagcgagaatcagcgttttgattcttggagtgataatgtctcaagcgccgatagaaagaacccagagataacggttactttggcggctgatgcgacatacaccccgaattttgtggataaacctaaaatagcggcgaacccttctgacttggagtttgtttatgatggttccgtaaggcttgtggatttgaaagagattttgagcggtatttatccgacagatgtaaatattaaatattcaaatacggatggatcggccgctaccccattgaacgcaggtacttatcttgtgactgtaacacgtaccggggacgagaactggcgatctttcgaggcaaccaagaaattagtgataaagaaagcgaaggtcgtaaaggtagtggctcctaccgcatctacgatcacggaaggtcagtccttgtcggaatccctattatccggtggtgttgcgaaaggtgccgatgggactaccatatccggtaaatttgaatgggctgacgcgtcagctatattgaaacccggcaatagccagaaaaaggaagtgatcttcacgtcgtatgatccgaattatgaggatgcgactacggaagcggaggttacggtgaaaagttcggatgcgttagttgtcacgtttgctcaaccggaaaatggttctttgaaagtctatatgttgaagggtgagggcgagaagaccgagataacgagtggaaccgctgtggcgaaagcgactaagctaatcattgaggcggaagccaatccggattatgaattggccgttattcaaataggcgaagagaagtatacgacttcgcctgtagagattgaagtcgataagtccttggctattatggcagagttcaagccggtttctacacctccgggaacagatgtggctgttacgggagtttctttgaatatcacgtccaaggcattggccgtaggtgaatcttttgccttgcaagcgaaagttacccctaataacgccacgatgaaaactgtctcttggagcagcagcgacgagacggtggctactgttgacgcggatggtgtcgttaccgcattgaagatcggtacttgcaagattaccgtggctaccgatgatggaaacaagacggcgtcttgtgtggtaactgtctccggtacggtaggtatcgagcaaatcatcgacgatcatcaaatctattgcgagcgaggtgcgataaccgttcatccggcccgtccaatctcgatccgtatcatagcggtgactggagttagcctgtatggcgactcaattatcggacctacccgcatcccggtatcgacaggaatctatctgatagagatcaacgagaatggcaagcatataacagtgaaagtaaacgttcgctaacaaccttattttaagaaactaacccttgagtctttaatgttggggaaggccgctaggaatactctgttccggcggtcttcttttttatcattgtatatgtacgaatagcctttgttagagttgtagaggttaaatattctaaaaccctttcggcttacttattttattcgttcttttgcaagaaaattgggaggtgtgttctctgtacgcatctccttaatttatttaacgttaataagtgagagtctgatggctgaaaataaaaaagttagttctgtttctttctttaactcccggcttacgtctgttattagtatctccttggtactattcttgctaggactcattctattgatagggatgttgggtaataaactctccgtttatgtgaaagagaacttatctttctccatcgtgctgaaagataaccaaaaagaaactgagataaagaaaatgcagaagagcttggatgctcttccttttataaaatcaaccgagtatatatcgaaagagcaagctgcgaaagagttggaggaagaactgggcgagaatccggaaatcttcttaggctttaaccctttacaggcctcgattgaggtgaaactgcattcggagtacgccaaccccgatagcctccaagtgatagagaagaagattagaaactatacgtcggtctcggagctgctttaccgaaaggatatgatggagatagtccataataatatgaagcggttgggcttgatcctgcttaccttggcggcggtactgatgattatctcgttcgtgttgatcagtaatacgattcgcctgttgatttattccaaacgattcttgattcatacgatgaagctagtgggggctacttccggctttatacgtaggccttttgtgaaatataacatagtaagtggcattttcgcctctatcttggcaatattgatgctaaccggagcgttatattatttgcaaaatgaattgaaaggttttatccagatattggatatgcaaacattattattggtttatgtggcagtgtttgctttaggtattgtcttgtccgtgatcgcaaccatttttgccgtgaataaatatttgcggatgggggtcgataagttgtattatatttaatgtacgaataataaagagttgagaaagatggctaaaagagattttgctttcggaaaagagaattttatactgattgcggtagcggttgcctgcatcgtgcttggtttcatattgatgagtggtggaggttccggggataatacgttcaatcccgatatattcagcgcccgccgtatcgtggtagctccggtggttacggttatcggtttcgtgatgatgatttttggaatcttgaagaatagcaaagataaagaagtaacagaatgagttggtttgaggccttgatactgggtatcgtacagggattgaccgaatatctgccggtgagcagtagcggtcatttagcgattggctcagctttgtttggtatagagggagaggagaatcttgcgtttacgatcgtcgtgcatgtggcgaccgtattcagtacgttagtggttttatggaaggaaatcgattggatattccgtggtttatttaaatttcagatgaacgcagagacgaagtatgtgatcaatatcttgatttccatgattccgatcgggatcgttggggtattctttaaagatacggtagaacaaatctttggatcgggtttattggtcgttggttgtatgctgctattgacggcggctttgctggcattttcgtattatgccaaaccacgccagaaagagtcgatctcgatgaaagacgcttttattatcggtctggctcaggcttgcgccgtgatgccgggtttgtctcgttccggatcaacgatcgctaccggtttgttattgggaaataataaggcgaaactggcccagttctctttcttgatggtaattcctccgatcttaggagaggcgttgctggatgtgatgaagatggtgaaaggtgaagatgtggctggggacattcctgcgttatcattagcggtaggtttcatggccgcttttgtttccggttgcgtggcctgtaaatggatgatcaacatcgtgaaaaaggggaaactgatttatttcgctatctattgtgcgattgcgggattggtgacaattgcttgtacattacttaaataaagaatggattttatagctggagagattttatattttaataaaccgctaacgtggacttcttttgacctagttaacaaatttcgctataagctaagtcggaaactgaaggtaaagaagattaaagttggacatgcggggacactggatcccttggctacaggtgtgatgatcgtttgtaccggaagggctacgaagcgaatcgatgagtttcaataccagacgaaggagtatatcgctacgttgaagttgggagagactaccccgtctttcgatttggagaaagagatagacgccgtgtatcccacggaacatataacccgtgagctcgtggaggaggttttaaagacattcgtgggtacgatccaacagattcccccggtgttctccgcttgcaaggtggaaggtaagcgtgcttatgagctagctcggaaaggggaggaggttgaactaaaatccaagacattggttatagacgaactggagttgctggagtgtgatttgcctgttataaagatacgggtggtatgtagcaaaggtacctatattcgtgcgttggctcgtgatatcgggaaggccttggattccggcgctcatttgattggcttggaacggactcgcatcggagaggtaaccttggatatgtgtatgtctccggaggagatcgatgatttcttagagcagaatgtggtaaaaatagaagaagaaaaataaatagagtgcattatgaagctttcgaaattcaaatttaacttaccgtcggaattaatcgctttacatccggcgaagaacagagatgagtcgaggttgatggtcgttcatcgtgatacgggtgagatcgagcaccgcgaattcaaggatattctagactattatggaaaaggtgacgtgtttatctttaataacacgaaagttttccccgctcgcttgtacggtaacaaggagaaaacaggggcgcgtatcgaggtgttcttgttgcgcgagctgaacgaggacttacgtttgtgggacgtattggtggatccggctcgtaagatccgtatcggtaataagttatactttggcgaggatgattccatggtcgcagaggtaattgataatacgacttcgcgtggtcgtacgctccgtttcttatatgacgggaaccacgacgagtttaagaaggctttgtatgccttgggcgagactccgctgcctaagtatatcgaacgtgaggtggaaccggaagacgaggatcgttatcagaatattttcgccgcggaagaaggtgcggttgtggctcctgctgcgggattgcattttagccgtgagttgatgaaacgtttggagatcaaggattgccagttcgctttcttgacattgcattcgggcttgggtaatttccgtgagatcgacgtggaagatttgacaaagcataaaatggattctgagcaaatggtcgtaaatgccgatgtagtggatatcgtgaacaagggaaaggatgaggggcacaaggtttgtgcggtcggaacttccgtgatgcgtgcgatcgagacggccgtaagtacggatggtcatctgaaagagttcgagggctggacgaataagtttatcttccctccgtatgatttcagcgtggctaccagcatggtgacaaatttccacatgccgttgtctacattattgatgatgacagcttctttcggtggttatgagttgatcatggacgcttacgatatcgctttgaaagagaaatatcgtttcggtgcttacggcgacgctatgctaatcctttaatccggtttctatggcgacagcttaccttggattaggtacgaacgtaggtaataaacgaggaaatttggtgacagcggcggcgctgttggctgaaagggtgggagatgttcttgccctttctgatatgtatgagacggagccttggggatttgaatcggacaacactttcttgaacgccgtgatcgttatgacgacggaactttcccctatggaattattagacgctacccgtttgatcgagatcgagatgggacgtatcgaaaaaagtgacggtgcgtatcatgaccgtatcatcgatatcgatctgttaatggtggatgagcaaatcctgcatacggagcggctgacgctaccgcaccctctgatgcacaaacggtcgtttgttatggaaccgttggcagaagtagctccgttggtgaaacatcctgtgtttggcaagacgatgcgtgaacttttatccgaattataagttttaattatgaactacgagatttgagttatgaataaagaaattaataaagcgatgacgcaagggatcgtcttcaagaaagcgaaaggcgaagcggaagattcgaatggtaagaaaatcaagttctctgatttcttgaaagggacacatggctctgattcagcgaaatggaaggccggttttaaatataaaaaagccttacgtaattccaaaaagaagaaataattttcaattttcaactttcaattctcaattattgcgtatctttgcgaatgaattgacgtggatagatttgtattgcttgcaaccacgggaaaaaatgctaaaaacatatccttttcgttgccgtccggcagaaaaatccttccaagttcaattcagtcatagattaataactaacgagcattgtcaattgcgacctgtggtttatcccctaattctcaattttcaattctcaattttcaatttaaaacgatgagttatttattcacctccgaatcggtgtctgaagggcaccccgataaagtagccgatcaaatatcggatgctttgctggatgagttcttggcgtatgacaagaattcgaaagttgcttgcgaaacccttgttacaaccggacaggttgtcttggctggagaagttaaatcaagtgcgtatgtggatgtgcaggaagtggcacgtggcgtgatcgagaagattggttacacgaaaagcgagtaccagtttgaagcgaagtcatgtggtgtgttctcttctatccatgagcagagtggcgacatcaaccgtggcgtagagcgtgcggatccctatgagcagggtgccggcgaccaaggtatgatgttcggttatgctactaatgagactgagaattatatgcctttggcgttggacttatctcatagtttattatgggaattggcgaagatccgtaaggaagaaccggatttgatgccttatttgcgtccggacgctaagagtcaggttacgattgaatacgatgataacggtaagccgttgcgtatcgatacgattgtggtatccacgcagcatgatgagtttatcggtccgaaaggtatttcacagaaggaagcggatgaggctatgcaaaagaggatcgccttagacgtgaagaagatattgatacctcgtgtgaaggctcaatatccggctcatgtacaggctttgtttaatgataatatcatttatcacgtgaacccgaccggtaagttcgtgatcggtggtcctcacggtgataccggtttgaccggccgtaagatcatcgtggatacatacggtggcaaaggtgctcatggcggtggtgctttctctggaaaggacccttctaaggtagaccgttcggctgcttatgccgctcgtcatatcgctaagaatatggttgccgccggtgtggcggatgagatgctggtacaggtgtcttatgcgatcggtgtggctaaaccgatgaatattttcgtgaatacttttggccgtgcgaaggtgaatatgacagacggagagatcgccgcgaagatctgggatatcttcgatatgcgtccgaaagcgatcgaggagcgtttgaaattgcgtaacccgatttatttcgagaccgcttcttatggccatatgggacgcaaaccccagacggtgacgaagacattctcttcccgttatttgcagaagccggttacttgtgatgtggagttattcacatgggagaaattggattatgcagataagatcaaggacgtgtttggtctataaaaaataagtggaaaaagtaagctggcttaaatggcgaagtatgttaagatactttgccatttaagttaagatacttagccgatgaagttaagatactttgccaagtatgttaacttacccttcctcttggagcatttctacttcttttactttcctgaacaggtcggacgcaaagatgaaatcgttcaacgcttggttattagaggtgattacctgctcttttgttccttgccattccttcacgccttccttaataaagatgatattatcaccaatattcatcacggagttcatgtcgtgggtattgataacggtcgtcatattgtactccaccgtaatgtcgtgaatcaaatcatcaatcaatagagaagtcttggggtctagtccggagttcggctcatcgcagaacaggtatttaggatttagggagatcgctcttgcgatggcggcacgtttcatcatacctccactgatctcggaaggatatagatgtccagcctcggacaggtttacacgttccaaacagaattccgcacgtttcctgcgctctttcgttgagtctttagagaacatatctaaaggaaacattacgttttccattactgtcatgctgtcgaataaagcggaaccttggaacaacatacccatttcccgacgcagcatatttaactcatacttgttcatcgtgatcaagtctctaccgtcgtataatatctgtccggtatcaggtttcattaacccgatgatattcttgatcattaccgttttacccgaaccgcttcgtccgatgatcagattcgtcttaccatcctcgaacgtcgtacttatatctttcaagacgacacgtccatcgaaagacttcgttatattcttaacttcgatcatttttaagtaagcattaaatgggttaatattacgtcggcaagtaaaatcatgatactgctcatgaccacggcattcgtacttgccttacctacctctagggcgcctccctttacgttatagccaaaataggcagcgatggatgagatgatgaacgcatatactacggatttgataatagaataccaaatgtaaaactcgttgaagtagaattgcaaaccgtactcgaacgaggaaggagtcattcccgtactcgttgagtaactggcgaatatgccgcccatgataccggtgaacatactgaagataaccaataccggaataaagatcatcaaaccgagcattttcggaaggatcaggaagttggctgaattaacacccatgatttccatggcgtctatctgctcagtgactcgcatggttccgatctcggaggcgatattactgcctactttacccgctaggattagtgccatgatagaggaagagaattccagcaagataatctcacgggtggtatagccgatcgtaaacttaggaatcaagggggaactgatattcaaggagatctggatggcgataaccgtaccgataaagaccgagatgattatgacaatccaaagagaatccacgcctagcttgtatatctctttgatcaattgcttaaagaacatactccaccggtctggaagtgttatactcttcatcatcagtagggtatactcacccattctgtgtaatgctttattcatttttatcttgataaatttctgatttcaatttgcaaagatagcgtaaaatccactaataaccatataacatcttagaaacaagattggttttatttgtaaatcctatggtattaaagtttgccacatccctcttttttaactatgtttgttttcttaaatactaaaaaatacttttatgaagcgaattcttttaggagtgatcggcttgctgtgtttatgtgtggcttgcctgcggaaggatctttcttttaagccgggggaagtttggccggatgataaaggggtacatataaacgctcatggtggcggtattctacgggttggggatacttattattggtttggtgaacataaaacggagggctcggctggaaatctggctcaagtaggcgttcattgctattcgtcgaaagatttatataattggaaagacgagggaatcgccttatcggtcgtgccggatgatacgacgagccatattgttaagggatgcgtgttggagcgtccgaaagtgatttataataaaaagaatgatcaatatgtaatgtggtttcatttagagccgagaggtgctggctattcgggagcattgagtggagtggctgtcagtaaaaacgtggcggggccttactcgttcgtaaacgctttccgtccgaatgccggtttttggccggttaatgtacaggaactacataagcaaccttgtacgctttccgcagatctacgttttagcggtggagagttacctgcccatccggatagcttgaatttattggggcgtgaccaaatctccggacaaatggctagggatatgaaccttttcgtggatgacgatggcatcgcttatcatatttattcctcggaagagaatagtaccttgcatatatcgcagctgaccgatgattatacgagttattccggtaagtacgcccgtttcttcccggggcgtttcatggaagctccagccttgttcaaacagaaggggaaatattatttgattatgtccggctgtacgggctgggctccgaatgcgggacgatcggcggtcgcttcctcgatttggggaccttggaaggaattggaaaatccgtttaggggagagaactcggaggtgtcgttttattctcagagcacgtacgtattgcctgtacccggccatgcggatcgctttatttatatgggagatcgttggactccggagaacgctatagacggacgttatatctggcttcctatccgattcgagggggagcaacccgtgatcgagtggcgatctgagtggagttattaaattctcttatcgcttttttgcgaatgtatgtgatgtagatctgcggattatcacgtacattcgcgttaaatttttaagtagcttatgtcagacgaacaacgaatggtgctccgtacggaggacttggtaaagaaatataggactcgtacggtcgtgaatcatgtatcgattaacgtgaaacagggggagatcgttggtttgcttggtccgaacggagcgggaaagacgaccaccttttatatgacagtaggtttggtcactcctaacgagggtaagatcttcttgaatgacatggagattacgaaattcccggtctataagcgggctcgcaacggcattggctatctggcgcaagaggcttcgattttccggaaaatgacggtggaagataatatccgctcggtcttggagatgacgggacgtagcattgagtaccaaaaagagaaactggaaagtttgatttcagagttcggtttgaataaggttcgtaaaaacttgggagaccagctttcgggtggagagcggcgtcgtgcggagattgcccgctgtctggcgatcgatccgaagttcattatgttggatgagcctttcgccggtgtagacccgatcgccgtacaagatatccagacaatcgtggctcgcttgaaacataagaatatcggaatcttgattaccgaccacaatgtgtacgagacattgagtatttgtgaccgggcctatctcctgttcgagggaaaagtccttttccaaggaaccgccgaacaactagccgagaacgagatcgtgcgcgagaaatatttgggaaaagactttgtgctgcgtaagaaagacttatagcagtcgtttcaatcgcctgtttacctgtatgaacagcaggaaagataaggcggcgataagacaaaagtccaaaagatgctcggcgggaatatcgcctgtgataaactcgttatccttgagacgactgtccgacatccctattacggcgaaagcattattgacaaagtgggcgaacaccggtatccagatgctcttgctccaatagagtagatagccgaaataggctccgagtatcatccggggcaagaatccgtaaaattgtaaatggaaggcgctaaatagtatggcggcgacccatatgatcgtatgagggttggaggtccatttcccgatcactcgttgcaaggctcctctgaacaggaactcctcggttatcccggccgtaacggcgataacgataaggttggccaggattacccaaacgctatcgctggataacaggatcgtcgtcagttgttcggcgagggtttcttgcgcccgcatccattcctcgataggagccataaacgcgggtaactccatctgcttgttgagcaatcctagcaaattgataaccggagaaaataagaacacgcaaactaaggtgagaatccagatcctgccgtctgtgattttcttgactgatagataatggcagggattgtcactacatatccaagccatggcgatagatggtagcaaaaaggtacagatcgccgagatgaactgaatgagcctcattaaattagcgtcttgggttatatcagcctgtaaaccgtgggtcgcaagtaataagcccgtggatataatagatgataaaatggctccagccaataagaatagcaagaggatcaaaagttggattatcgccggacgggtagcatatattccttttattctcataatgattcattcaaagggtaaataattgccgccaaatataaacaaaagaataaaaacagatcaaaatttgcacgattaaaagaataagtctaattttgcgacctaaaattcgatacgactattaattaaataaatcattcagaatgaacgtttcgcttaaaaacaatgatgccgtaagcggtatcgtgaaattagaaatagtgaaagctgactatgctgatcaggtagacaagagcctgcgtagccttcgtcagaaagccaatgtaccgggtttccgtaagggcatggttcctatgggcatggttaaaaaaatgtacggaaagcacgtgctggtagaggagataaacaaattagtttctgagaatctgttcaagtatatccgtgagaacgatttgcatatcttaggcgagccgatgcctaacgagactgagcaaaagccgttggatttcgataaggaagaggatttcgaattctgttttgacgtggctttggctccggagatcaatatcgagttgagcaagaacgataaacttccgttctatcaagtcgctatcgatgaagaaatgctaaataaccaagtaaacgcttatcgctcaaacttcggttcttacgacaaggtagacgaggttgaggaaaaagatatggtaaaaggtacggtagccgagcttgagaatggtgccccgaaagaaggtggtatcgttgttgaggatgctgtcttgatgcctatgtatatcaaggatgaggaagaaaaagctaaatttatcggtgctaaagtaaatgccgtagtggtattcaacccgaataaggcttacgagggtgctgaggcagagatcgcttctttcttgaagatcgataaagagaaagtggctgagactacaggcgactttagctttgagatcaaggagatcacccgtcataaagacgcagagatgaaccaagagttgttcgacaaggtatttggcgagaacgtggttaccagcgaggaagaattcaagaacaagatcaaggaagctttggcagagcaattcgctcctcagagtgacttcaagttcttgacggatactcgtgatatgttggttgagagagctggcgagttgaatttcgctgacgatttattgaaacgttggttgcttgccgctaacgagaagaatacgaaagagaagatcgacgaggacttccctcagatccttcaggatttgaaatatcagttgatcaaggagaacttggttaagaagaacggcttgaaggttgaggacgctgacatcgagaacttcgctaaacgtgtggctaaggctcagttcgctcaatacggcatgttgtctgtacctgaggacgtacttgacaactacgctaaagacatgttgaaaaataagcaaacacttcagaacatcatcgaccgtgcggttgaggagaaattggctgcttggttgaaagagcaagtggaacttgatgttaaggaggtaaccgctgacgagttcaacaaactttttgaataaaaagatctttactcggcctcttaggaggttgttttatatcaaaaaagggatttctctctaaaaatatcttagcggatagcgaaataaattgtttctttcagaaatttatttataactttgtttttccgttaagtcacagagggaaatccctttttacgtcttctcggtaaataaaagataggagaaaatatggaagattttagaaagtatgctacaaagcatttaggtatgagtggtacggctctggatagttatatgaacatctccagtagctatatctccccgacaattatagaggaacgacagctgaatgtcgctcaaatggatgtcttctctcggttgatgatggaccgtattattttcttgggcacgcaagtggatgattataccgctaacgtgattcaagcgcagttgttgtatctggattccagtgatcccggaaaggatatctctatttatatcaattcgccgggtggctctgtatatgcgggctacggcatttatgacacgatgcagtttatctccagcgacgtatctacgatttgtacgggtatggccgcctctatggcgtctgtcttattggtggcgggaaccaagggaaaacgtttcggcttgaagcactcccgtgtaatgatccatcaaccgcttggcggcgtacaaggacaggcttcagacatcgagattaccgctcgcgagatcttgaaggttaagaaagaactgtacaccataatctcggatcattcaggtagaccctatgaggagatcgagcgcgatggcgaccgtgatttctggatgaccgcggaggaagcgaaaaagtatggcatgatcgacgatgttttaacacgtaaataacaaaaacaacaataagaaactatggccaaaacaacaggcgatacatgtacgttttgcggcaggagtagccgtgatgttaatttgcttatcaatgggatctctggttgtatttgcgatgattgtgcccggcaggcgtatgagatcgtaaaggagcagacaggaggtaagaaaacttcttttggtttgaagcagaaagatctgcctaaaccggaagatatcaagactttcttggatcagtacgtgatcgggcaggatgacgcgaagcgttatctgtcggtatcggtgtacaaccattacaagcgtttacttcaaaaggttaccgccgatgatgtagagattgagaaatctaatattatcatggtgggcgctaccggtacgggcaagactttgttagcccgtacgatcgctaagttattgcatgtcccgttcgctatcgtggacgctacggtacttaccgaggcaggttacgtgggggaggatattgagagtatcttgacccggctattgcaagcggcggattatgatgtggaggcggcccaacggggtatcgtcttcatcgatgagatcgataagatcgcacgtaagagcgataatccgtctatcactcgggatgtcagcggtgagggtgtacagcaaggtttgctgaaacttctagaaggatcgatcgtgaatgtgcctcctcaggggggacgtaagcatccggagcaaaagatgattgcggtggatacgaagaatatcctgttcgtttgcggtggtgctttcgatggaatcgagaagaagatcgctcaacgcttaaatacccgtgtggtcggttattcggctagtttggatacggctaccgtagaccggaataatttactgaaatacatcaccccgactgatttgaagtcgtttggcttgatcccggagattatcggtcgtttacctatcctcacgtatctgaatccgctggatcgtgatacgcttcgtaacatcttgaccgagccgaagaactccattatcaagcaatacgtcaaattgttcgagatggatggcattaagctgacgttcgatgagaaagtctatgagtttatcgtggataaggcgcttgagtttaagctgggtgcccgtgggttacgttcaatcgtagaagccgtgatgatggacgctatgtacagtatgccatctcaaaaagtaaaggaactccatgtaacgttggagtatgcgaaagagaaatttgaaaaatcggacgtgaaccgtttacaggtcgcgtaaacgtaggcggtttactataaataatacgaagtatggcaaagaaggatcatttaacagaagagctaaatcggcactttggcttcggtacctttaaggggaaccagaaggctattattgagaacgtgctggccgggaaggatacttttgtattaatgccgacggggggaggtaaatctctttgttatcaattaccatccatactaatggaaggaaccgcgatcgtgatatctccgttgatcgctttgatgaagaatcaggtggacgcgatgcggaatttcagtgaggaagatggggtcgcccattttatcaattcctctttgaataagtcggctatcgaccaggtgaaatcggatatattatcaggacgtaccaagttgctgtatgtagcaccggagtccttgaccaaggaagagaacgtggattttctgcgtcaggtaaagatctctttctatgcggtggacgaggcgcattgtatctcggaatggggacatgatttccgtccggaatatcgaagaatccgtccgattatcaatgagatcggtaaacgtccgttaatcgctctgaccgctaccgctacacctaaggtgcagcacgatatccagaagaatctgggtatgatagacgctacagtctttaaatcatccttcaaccgctctaatttgtattatgaggttcgtccgaaaggaacgaatatagaccgcgagatcattaagtatattaaagccaacgagggtaaatcgggtatcgtatattgtttgagccgtaaaaaggtggaggaatttgccgacatcttgaaagccaacgggataaaggcgttgccttaccatgcgggaatggattcgcaagtacgttccgccaatcaggatgccttcctgatggaacaggcggatgtgatcgtggctacgatcgctttcggtatgggtatcgacaagccggatgtccgttatgtgattcattacgatatcccgaagagcctagaaggttattaccaggaaaccggtcgtgccggtagggatggcggagaaggccaatgtatcgctttctatgcttataaggacttgcaaaaattggagaaattcatgcaaggaaagcccgtggccgaacaggaaatcggcaaacagttgcttttagagactgcagcctatgccgagacttccgtctgccggagaaaagtgctattgcattatttcggtgaggaatacctggaagataattgtggtaattgtgataattgtttgaacccaaagaagcaggtggaagcgaaggaattgttaagcgcggtactggaggttatcagtacgttgaaagaaaagtttaaggcagattatatcgtaaatattttggtaggtaacgaaacctccgaaatccaaaattacaagcacaatgaattagaggtcttcggttccggacaggacgaggatgataaaacttggaacgccgttattcgtcaggctttaatcgctggctatttagcgaaggatattgagaattatggtttgctgaaaatcacggaaaaaggtaaggagttcatgaagaagccggtatcgttcaagattaccgaggacaatgaattcgaggaagaggaagaggaagttccggttcgtgggggcgcctcttgtgcggtagacccggttctttattccatgatgaaggatttgcgtaagaaattatccaagcggttggaagttccgcctttcgtgattttccaagatccctctttggaggctatggctactacttatccgatcacgttggacgagttgcagaatatcccgggagtgggcgctggtaaggcgaaacgttatggcaaggagttcattgagttgatcaagaaacatgtagaggagaacgagattgagcgtccggaggatttgcgcgtacgtacggtcgctaataagtccaagttgaaggtctcaatcattcagcggatcgaccgtaaggtggcgctggacgagatcgcgttgactaacggacttgagttcaccgagcttttggatgagatcgaggcgatcgtatattccggtacacgtatcaatatcgattatttcttgaatgatgtgatggatgaggatcatatcgaggatatttacgagtatttcaaggattcggagaccgacggtctggaagacgccattgaggaattaggcggtgactatacggaagaggagattcgcttggtccgtatcaagttcttgtctgaaatggcaaactaatgggagggtggcccggttccactctaaagaaaaaacaaataaagaagcttattgttccttccgaaagagatttatttttccttcggaaggaattttgttttcgttcggatgaaagtttattttcttccgaatcgaatttttaatttctcccgtatcgatttattgcgtgaaaagtcgtatatttgcgcgcaataatttttaaagcataagttctatgtcatttattgcagacagggtagttatggatgggttaacgtttgacgatgtattgttaatcccagcttattcggaagttcttcctcgtaatgtcgatctcacgacaaagttttcacgtaatatcacattgaatataccgatggtgtcggccgctatggatacggttaccgaggccaagttggctatcgctatcgcccgtgagggaggtattggtgtgattcataaaaacatgacgatcgccgagcaggcaaagcaggtccagaccgttaaacgtgcggagaatggaatgatctatgatccggtgactatcacgaagggcaagcgtgtggcggatgccttggcaatgatggctgaatataagattggcggtattcccgtggtggatgaaggcgggtatttggtaggtatcgtgacaaaccgtgacttgcgtttcgagaaggacatgaaccgttctatcgacgaggtgatgacgaaagagaatttggtcgtaaccggacaatctacggatatggaggccgccgctcagatccttcaggaacataagatcgagaagttaccggtggtcgatagccataataagttgatcggcttgattacctataaagatataacgaaagcgaaagataaaccgaaggcttgcaaggattcgaaaggtcgtttgcgtgtagctgccggtgtaggcgttacgttcaataccttcgagcgtgtagccgctttggtggatgccggggtggatgctttggtgatcgacacggcacatggtcactcaaaaggtgtggtggatgtcttgaaacagattaaggcgcaatatccgcatattgattgtgtggtcggtaatatcgctacgggcgaggctgctaaatatttagtggaagccggggcggacgccgtgaaggtaggtatcggtccgggttcgatttgtacaactcgtgtgatcgctggtgtgggtgttccccagttgtcggctatttacgatgtggcgaaggcgttggaaggaactggtgtgcctttgatcgccgacggtggcttgcgttactccggtgatatcgtgaaggcgatcgccgctggtggatcttccgtgatgatgggatctctgttggcgggtgtagaggagtcgccgggcgatacgattatcttcaatggccgaaagtttaagtcttaccgtggaatggggtcgttggaagctatgcaaaaggggtccaaggatcggtatttccaagatgtggaggacgacgtgaagaagctggttccggagggaatcgctgcccgtgttccgtttaagggttctttgtatgaggtcatttaccaaatggtaggtggtttacgtgcgggaatgggttattgcggggctcataatatcgaggagttgcataaagctcgttttactcgaatcaccaacgcaggtgtgcaagagagccatccgcatgacgtagcgatcacgcaagaggctccgaattatagccgcggtgaatagtaatacaagttttacgttttataaaaaacactaatttaatgggatagcatacttttcttgtcggctctccgttagattagtgttatttttgtaatgtatattcgtgctatggtaaaagaatttttgatgaaaaagttacttatttcattaggggtattcgcttgtgtgacagttaacgctcaaaccgcatccgattcggtcgttatgacggtcgctggaaaacaagtgcctttatctgaatttatttttatcgcggagaagaatggagaggtggatttatcgaatacaaagtccgtcaaaaactatgtcgagctatttaaaaattttaagctaaaagtagcggaggcggaatctttagggatcgaccagacatcctcattcaaaagtgagctggatggataccgggctcagttgatcgatagctatatgtcggataaggagggtgagaaagcggctgcccgtgcggtatatgaccgtggggatcactcggtagagttgacccacatcttattccgtttgccggagaagacggtctccaaagatacggtagctgtatatcaagaagccatgcgagtatacgaacgtctccagaaaggagaggatatggaaacagtcggaaaagctttggccgagaaggataaggagcatgtcgcttgcgaatatgtacgttgcttgctcccgatgcaatccctaaaagtgtttgaggatgccgcctattccttgccgattggcgtggtgtctgaaccggttcgcacgaaattaggatttcatttgataaaagtccatagtcgtaaacccaatccggggcgggtacatgtcgctcatatcttgatcgccttcccgaaagattccgctattcaggactcatcggcttttctggcaaaagcgcaagctatctataagcaagtacaagagggagctgattttggcgagttagcgaaagaatattctggggatgctgcttccgctaagaaagagggagtattaccttggtttggggtaggcgagatggtccagccttttgagcaagccgcttttgcgttgagcaagccgggtgatttatccgaggtggtggaaactcgttttggttaccatatcattaagttgatcgataagaagggacgcccttcgtttgaggaagaggaaaaagctttgtcgagacgtatggggcagggtgaacgtaacttcgagttatataaagctttcgacgatcgtatgaaaaaagaatacggatacgttttctatccggaagcctatgcggagctgcaagcgttatgtaatgattgtttccccacggacgaggcgttttatgagaaagcgaaggatatgaacaagacgcttatgcaattggatggaaaggatttcccgcaagcggagttcgcttattatatccaacgttgtccgttctcgacaaaaacgtatgcgggtgattttatgcaagagatctatgatttgtttatccgcgatatcgtaacgaccgccgagcgtaagaatctggagacaaaacatccggagatccctcatttgatgcaggagtaccgggatgggattctgttgtttgaggtcagcaaccgggagatctggagcaaaccctccgcccagcagaaggtgttggaagcgaagtggattgcggatttgaataaaaaatatccggtgactgtcaactggaaattattgaagaaactaaagaaataaaataaagatagatatgaggatagtcttcatgttcctaacgttcgttgtgttgttgggtgcctgtaaaggttctcggccagctgatactacggatgtcttggttagcgtgaaaggacgtaccctaaatcgttcggaggtgaataagctaataccccgggggatttcctccgcagatagtctgttgctggccgagggctttaccaagaaatgggtaaaggatgtattggtgtacgatgtggctttgcgtaacttaggggatgagaaagaggaggtcgataaattggtagaggagtacaggcgttccttggttcgttaccgttatcaggaacgattggtggaggagaagctgaaaactgatatccgggaaagtgataaattaaactattacgaggaaaaccagaaaaagtttatcttggataaaggcttgatcaagggattattcttgaaaatcccggttgatgccccgggacttaccgacgtcaaaaagtggtacaaatccacagatgtggcctctttagaaaaaattgagaagtatagtgtgcaaaatgccacgatttatgagtacttttacgacaaatgggttgatttcgatgaggtaatggataatataccgatccatgtgtcgaatccgaatgcgtttctgaaggcgaataagtatgttgaggtggcggatagcagttattgttatctgttgaatatcaaggaatatttaccttccggcagtgtggagccatatgattatgccagttcgcacgtcacggaaatgctggtcaaccaacgaaaagttgaattcttgaaaaaatttgaagacgagttatataacgatgcgatccggagcggtgacgtggaattccattccgagccgtgatctctaattttataaatgggtagacatgatgaaaaagattttaagtgtattctttcttgcctgttgttcttgcattgtaatggcgcaagacaatgtgatcgatgaaattgtgtgggtggtaggagatgacgctattttacgttcggatattgagacgcagcgtttgtataatcaaaacgagggggtccgtttggatggcgacccgtattgcgtgatcccggagcagatggcgatacagaaactatatctgaatcaagctaagatcgatagtattaccgtgaacgagaaccaagtgatccagagcgtggatcaatggatgaacatggctgtgaaccaaatcgggtctcgcgagaaattggaggaatatttcggtaagaaattttcccagatcaaggatgagcgtaaggagatggtgcgggagcagcaggtagtgcaacagatgcagcatcaattgatcggcgagatcaagctgacaccttctgaggtgcgtaaatatttcagccagttgtctcaggatagcctgccgaacatccctacgactgtagaggtgcaaatcgttaccttggaaccgaagattccgtttgaggaaacagacgctatcaaggcccgcttacgtgatttcacggagcaagttaattccggtaagatggaattctctacgttggctcgtttgtactcggaagatccgggttcggcgtctcgaggtggtgagctgggtttcatgagcaagacacagctgttgccggagttcgcgaacgttgcgttcaacttgaaagacccgaaacgtgtctcccagatcgtacagacggagtatggttaccatatcatccaattgatcgagaagcgtggagaccgtatcaactgccgccatatcttattgaaaccgaaggtttccgataaggagttggcggatgctaccactcgtctggattcattgtacaatgatttgcaggcgaataagttcacgtttgaggaagccgctacattcgtctcttatgacaaggatacacgtaataataagggtttgatggtaaaccaagattacgagagcagcaatatgggaacccctaagttcgagatgcaagaacttccgcaggaaatcggtaaggtggtatatggcatgaaagtcggagagatctccaagccttttaccatgttgacgaacaagcagaaagaggtagtagctattgttaagctgaaagctcggacggaaggacataaggcgaatttggccgatgacttccaagctttgaaagcgatcgtagaggctaagaaacgtgaggaattattgaacgactggatcacgaagaaacaaaaatcaacctacgtgcgtattagtgacggttggaggaattgtgatttcaaatatccgggttggattaaggaatgagactaattaacaggttatttctagcgctcttatcgtgtgctttatcggttggcgtatttgcgcaaacgcaagatagcacggtggtagccgccaaagatagtgtcgctcccaagaagacgaaggtctttttggagcatgcgaatacgctttcgttcgataaggagaggaacgccgaggctcaagtactgaatggtgatgtttgttttcgccatgatagttcgtatatgtattgcgatagcgcatatttctttgagcagaccaattccttggaagcgtttagtaatgtccggatggaacaaggggataccttgttcgtgtatggaaattacctgttttacgatggaaatacccagatcgcttatttgcgggagaatgtccgcatggagaatgggcaggttaccctgtttacggatagcttgaactatgagcgaatcccggatatcggatattatttcgacggaggtctgattgtcgattccttgaatcagctctcttctttttatgggcaatattcgcctagtacgaaattggctatcttcaatgatagcgtccgtctggagaatgagcaattcacgttgtattccgataccttgcattataatacggactcgaagatcgccacgatcctcggaccatccataatcgtctcggatagcggcacgatctattcttccagaggttggtacgataccgtgaataatacctctttgctattggatcgttctcaggtggtttccggcgaccgtatcttgacgggcgactctatcgcctacaaccgggaactgggttttggggaagcgttcggtaatatgagtctgcaagacacggcgcagcatgtcatgctggaaggccaatatggcttttacaatgagaagagcgagtatgctttcgctacggatagcgcccgtttcttggaattcagccaaggggatacattgtttctgcatggtgataccttgaagatgactacggtggactccctttaccgggaagtaaaagcttattacggcgtccgtttctatcggacggatatgcaaggtgtttgcgattcgatgcagtttaatacaagagactctatattatatatgtatacggaccctatcgtttggaatgaacagtatcagatctatggggatacgatcttgatatttatgaatgatagctcgatcgatttcgctcacgtgaagcaattcgctttcgcgatacagcaaatcgattctaccgcattcaatcaattaaagggaaatgacttgaaggcttatttcgagggacaggtcgtgaatcagatcgatgtgtcgggcaacgccgaatctatatttttccccttggagaaggacggttcgatggtcggcatgaacgagaccaaaagcggtttccttacgatctggctaaaagacaataagttggataaactgaaaatctggccgactccagcaggtacgatgacccctattcctgatttgaagcccgaccagaaatacttgaaagacttttattggtttgattatatccgtcctaaagacaaggatgatatttatcaggtcgtgaaaagaaaagctcaagatgctccgaaaagaagcaataaattcgtacattagcgtcgtattcataattaataggtaaagctatggcacttttctcgttttataacatgcgcaagccgcgtcaatttgatcataagcctatttattgggacccccataaggaagccttggaggaacgtataagcaaggtcaaacgtgaaatgggtgtagaggagccgttggaggaatataagccgcatatcaagggaactttcattgaaggtacctcgcatctgaagaaaagcgtggggcgaggcgaggattcccgggctcgtaggtataagaatgtgaaactggcggtggccttggcggtcttggctgctttcttttggtatttgttctggtaatgagcgatatcattcatttacttccggaccatatcgccaatcaaatcgcggcgggagaggtgattcaacgtccggcctctgtcgttaaagagttggtcgagaatgcggtggacgctggcgcttccaatatccaagtgaacattaaggatgcgggtaagacattgatacaggtgatcgatgacgggaaaggtatgtccgagacggatgctcgcatggcttttgagcggcacgctacttctaagatttctacggccgaggatttattctctttgcatacgatgggtttccgaggtgaggcattggcctctatcgccgctgtcgcccatatagagttgcgtacccgggctagagggaccgagcttggcacttgcctatccatcgcgggttccaatctggagagtatcgagccggaggcttgtaacgagggaagtatcttctcggtaaagaatcttttctttaatgttcccgcccgccggaaattcttgaagtcgaatgagacggaattccggaatatcatcaatgagttcgagcgaatcgccttggtgaatccgcaggtgggtatgtctctttatcataatgatgcggagatattcaatctgcccgagtcggggttacgtcagcgcatcattaatatatatggtaagagtttaaaccagaagttgctctctctggatgcccaaagttccatggtgactatttccggtttcgtggggcgtccggactcggcgaagaagcgaggggcattgcagtttttttttgtgaatggtcgttatatgaagcatccttatttccataaggcgatcatgcaggcctatgagcaattgattcctgccggggatatgccgaattattttgtttatttcacgttggatccctcctcgatcgatgtcaatatccatccgacaaagacggagattaagtttgagaacgagcaaccgatctggcagatcttgatggccgctacccgggaggcgttggctaaatcgagcgctatccctacgattgatttcgatgtggaggacgcgatcgatattcctgtttacaacccggtcaagaaaagtgagcctagtacttataaggccccgaaagtgcaagtggattccagttataatccgtttgacactacttcctataaaaaaccggaattcgattggtctaaattatatcaagggtttgagaacgaccgagtggctgtccaacgggagtccgagactttcgaggatgccccgatcgaggaattgccggccgaggcttcggatccggaaaaactgtttacggaggtaagcaatccttgctatcaatataaagggcgatatatcgtgacatccttgaaatcgggtctggcgattattgaccagcatcgtgcgcatgtgcgtatcttgtttgaccaatacctgtcgaatatccgtcagcaacaaggtgtatcccaacaagtcttattcccggagatcgtagagtttaccgctgctgaggcggctgtactgccttccttattggaggatttgtgcttcgtcggctttgatctgagcaatctgggaaatgacaattacgcgatcaatggcctgcccgccggtatagagaaccttgatccggtaaatttggtaaaggatatcgtggaccgggcgatcgagaccggatgcgcagtgcatgagaaaatctgcgaggccatcgccttgtctttagccaaagccgccgctatccgtcccggcaaatccttatccttggaagagatggatcatctgatcgcctccctgttctcttgttcggactcgaacctgaccccggatggaaagacgattatctccatgctgacagatgaggagctggagagaagatttaagtgctagggatgatttcgatgacataggtttcacggctgcatttacatttaggtttcccggacatgcggcccggaagcaggcgtggaacacatcttcctcgatcggacgtttatagaaagcctcattcgatcgcatgatcgcctcctcctttgcggaggtgaaccaatggcgctctcctttttgtaactcgtttttcagctgggcgtagatttgatcatgctcgataccttcgcaattaatcttgctttgcacctccacgcataggaaacggcggcttccagtggggtcgcttaataggttcttctggttcgtagtgccaataaatgaggctaggcggggtaggggggaaatgcttggcgtgtgccttgcgtacgttcattccggccatctgcatccaatttttcagtaaagccattttacggtcggacaaccggttgaactcatcgaggttgatgagtccgaacaatccaagcttctgctccatttgcgtcgagccgctaaggtctacgctatccgtgtaatagcggactagcgaagaaggcatcagcgacttgcaaaaggtagacttctgacatccttgacgctcgctgactaaaatgggagccaagctatttgcgtgcattcggtccgaacccatccattgcgaggccaaggcgagcatccagcgatgaaacccctccacccataacggttctgaggagacccgtcgtgccagatcgcttacccggtctttcccgtcccattcgggtaaccactccatatattgccggaaaggatgatactcttttacttcttttgaatatacgaaacgattcacatcccgatccctgcaatcgatccccgtccgtcttgcctccatgcaaatgctatttaggtcacgttgcgtcaccggatagaagcgatccgtttccaattgtttgtatcgatattcagtctcctcgctcaacaagttgaagtggaattcgatccgttcttggaggaaagtctccagactcttttgaaggatagagttgctgttgctcgatcgtttcgctttaccttcgtttgggtgtggtacggtgatcgacccgtccggttttaagaagcgaagccataattggcctaaaaaatccaatacagttttcatgacgctatgttttagaggttgtttttactgtttcattttgcggatataagctgttaacttgcgtttttccaaatgtttatattgtcatttgaaataaaagtaatctgtgcgaaatactagggaaaactattgtttaagtggtatggatgtagtacctttgttaagtgcttataatcttttcacctatgtgaaaagaacgtatcacaatcatgaaacgatcgtttcacataggtgaaaagatcatatcacccttgtgaaatgactaatagcatacgatgtttcgatgaataaccttttaatctcatactagatatatggcagcaaaatatgacttttacaagactccggtatcgaaggacagcacgaagcgtcctcgttttcacgcacgtatcgtatcatccggcacgatcgatacggatgatctggccaaacgtatccatggacggtgtaccgtcacgccggcagacgtagccgccgtgcttatctctttaagcgaggtgacagcggaatatttgcgtgaaggaaaacgtgtacatatcgatgggttggggtatttgcaagtcacgttgcaatgcccggccgtacaatccacgcacgagatacgtgcggagtccatccgtttcaagtccgtggctttccgtcccgaggtagagctgaaagatagcttgaagacgatgacgctggaacgagccaagtacaaatcccattcccgccaattggagcctgatcgtatcgaccaattgctcgcgagttattttgccgagcatgaatatatgacccgtgtcgccttccagcggctttgcggcctgacgagcagtacggccagccgccgcctgcatcaatttgtcgaggcgggtaaattgcgtgatatcggcacccgccaccagtcgctttacgtgccagtgaggtaaatagagatagtgaatgttaaatattaataaatacggctagggcctaccttgccaaacgggaacaaatatgtacctttgcaccgtttttagtgcggagtatacgaaaaaaacaggcacaacttattgattgtccgaaaataatgcgtaactttgcggctcgaaataggaaaagattagataaataataataacacattcaaagtttaaaaaaagaaagaaatgcctacaattcagcaattagttagaaaaggaagggaaactttggtggagaagggtaaatcacccgcattggacgcttgtcctcaaagacgtggcgtttgcgtacgtgtttacactacgactccgaagaaacctaactctgcaatgcgtaaagtagcgagagtacgtttgacaaatggtaaggaagttaactcctatattccgggagaaggacacaacttgcaagagcactctatcgtattggtacgtggtggtcgtgtaaaggaccttccgggtgtgcgttatcacatcgtacgtggtacgttggatacagcgggtgttaacggccgtacgcaaagacgttccaaatatggagctaagcgtccgaaaccgggtcaagcagcagctgccgcaaaaggtaagaagaagtaattaattacatgccttcaaactgagatttaaatttaagtattaaaacaggtttgagttatttggataggctataaggttgagtaaatggttcagcggaaccgttgaagacaaattaaaggcaaccaacgacaagaacaaatttttgaaaacaaaatgagaaaagcaaaaccaaagaaaagacagatccttccggatcctgttttcggtgatgtaaaggttacgagattcgttaaccatttgatgtatgatggcaagaaaaatactgccttcgaaattttctattccgctttggaaaccgttaagggcaaattgcctaacgaggaaaagtccgctctcgaaatttggaaagctgcgcttgataacattactcctcaagtcgaagttaagtcacgccgtgtaggtggtgctacattccaagtccctactgaaatccgcccggatcgtaaagagtcaatttctatgaagaaccttattatcttcgctcgtaaacgtggaggtaagactatggctgacaagttgtctgcagagattgtagatgctttcaataaccaaggtggcgcattcaaaagaaaagaagatatgcaccgtatggctgaggctaaccgtgcgttcgctcacttcagattttaatttttaaggcaataaaaagaatatggcaaacaacgataagcaattgatgttcactaggaacatcggtatcatggctcacattgacgctggtaagacaacgacttctgaacgtatcttgttttacacaggtttgacacacaagatcggtgagactcatgatggtactgctacaatggactggatggcgcaggagcaggagcgtggtatcacgattacttccgctgctacgactacattctggaactatttgggcaaccgttataaaatcaacttgattgacactccgggacacgttgacttcacggttgaggttgaacgttctcttcgtgtattggatggtgctgttgctacattctgtgccgtaggtggtgttgagccccagtctgagactgtatggcgtcaggctgataaatataatgtacctcgtatcggttacgttaacaagatggaccgctcgggtgctaactactatgaggtagtacgccaattgaaggacgtattaggagctaatccttgtccgatccagatccctatcggagctgaggagactttcaagggtgttgtcgacttgatcaagatgaaggctatcttctggcacgatgagactatgggtgccgagtatagcgtagaggagatcccggcagacttgcaagctgaggctgaggagtggcgcgacaagatgcttgaggctttggctgagtgcgacgacgctatcatggagaaatacttcgatgatccttctacgatcacggaagaggagatcatggttgctatccgcaagggtacgttggctatgcagatcaacccgatgacttgtggttcttctttcaagaacaaaggtgtacagactttattggatgcagtttgcgcgtttttgccttctcctgaagatactccggctatcgagggtacggatccttcagatcctgataaaataatcactcgtaaacctttgttcgaggagccattgacggcgttggcatttaagatcgctaccgacccgtatgtaggtcgtttgtgcttcttccgtgtatacgcaggttctatcaacgctggttcttatgtgttgaacactcgttccggaaagaaagagcgtatctcccgtttgttccagatgcactctaacaagcagaacccgatggaggtgattggttgtggtgatatcggagcaggtgttggtttcaaggatatccgtacaggtgatacgctttgcgacgaaaaccatccgatcacattggagtctatggaattcccggaaccggttatcggtatcgctgtagagcctaagactcagaaagacatggataagttgggtatgggcttggctaagttggccgaggaggatcctactttccgcgtacagacaaacgaggagacaggtcagaccgttattagcggtatgggtgagcttcacttggatatcatcatcgaccgtttgcgtcgtgagttcaaggttgaatgtaaccaaggccgtccgcaggttacttataaggaggctatcacgcagccggttgagcttcgcgaggtttacaaaaagcaatctggaggtcgtggtaagttcgctgatatcatcgttcgtatggagccggctgacgagagcttcgagggtactttgcaattcatcgatgaggtgaagggtggtaacattcctaaggaattcatcccgtccgtacagaaaggtttcgagaaggctatgaagaacggtgtgttggcaggttatccgcttgacaagctgaaagtgactttgatcgatggttctttccacccggtagactcagaccagttgtctttcgagatcgccgctatccaagcgttcaagaacgcttccgccaaggcaggtcctgtattgatggagccgatcatgcagatggaggttgttactccagaagagagcatgggtgacgttatcggtgacttgaacaagcgtcgtggacaagttgagggtatggagactagccgtacgggagcccgtatcgtgaaggctaaggttccattggctgagacattcggttatgtgacagctttgcgtacgattacttcaggtcgcgctacatcttcaatgcagttctcacactacgctcaagtatcctcttctatcgctaagcaagtattgacagaggtgcaaggtcgcgttgatttgatcaaataatatttagaaacatataataaatatgagccaaaagatcagaattaaattgaagtcttacgattattctctggtagacaagtctgccgagaagatcgtaaagacggtaaaggctacaggtgctatcgttagcggtcctatacctcttcctacgcacaaacgtatctttacagtgaaccgctctactttcgttaacaagaaatctcgtgagcagttcgaactctcttcttataagagattaatcgatatctatagctcaactgcgaagacagttgacgctttgatgaagctagaattacctagcggtgtagaagtagaaattaaagtgtaagtttttaacaattagtgaaatgccaggattattaggaaaaaaaatcggaatgacatccgttttcagtgccgagggaaaaaatcttccatgcactgttatcgaagtgggtccttgtgtggttacacagatcaagactttggagaaagatggctacgaagctgtacagttgggtttccaagagaagaaagagaagcacacgacacagcctgagatgggtcacttcaagaaagccggtgtagcacctcaaagacacttggccgagttcaagaatttcgaaactgagtacaagttgggtgacgtgatcactgtagatttcttggaagacgcaggtttcgtggatgtagtgggtacatcaaaaggtaaaggtttccaaggtgtagtaaaacgtcatggttttggtggtgtaggtcagactactcacggtcagcataaccgtgctcgtaagccgggttctatcggtgcttgttcttaccccgcaaaggtatttaagggcatgcgaatgggcggccagatgggtaacgaacgtgtaaccgttcagaatcttcaagtgatcaaggtaatgccggaacacaaccttttattggtaaagggatctgttccaggagcaaaaggttcaatcttattaattgaaaagtaatggaactgagcgtatttaatattaaaggtgaagataccggaagaaaggtaactttgaacgatgcgatcttcggcattgaacccaacgatcatgctatttacttggacgtaaagcagtatttggcaaatcaacgtcagggaacgcataagtctaaagagagaagcgaagtatctggtagtacacgtaagctgatccgtcagaaaggtggtggtggcgcacgtcgtggtgatatcaactctccggtgttggttggtggtggccgtgtattcggtccgaagcctcgtgattatgagttcaagctgaacaagaaagtaaaatctttggctcgtaagtcagcattgagctacaaggcaaagaacaatgcgattgttgtcgtagaggatttcacaatggaagctcctaagactaaagaatttataacaattgctaaaaacttgaaagtggctgataaaaagttacttatggttttaccggagaagaataatttagtatatttgtccgctcgaaatttagagaaggcaagtgtaataactgcttctgaactaaatacatacgctgtgttaaacgctgttaatttggttttaacggaaagttcagtcgctgttgttgaacaaaattttaaagcataaggagtagaataatgggaattattattaagcctatagtaactgagaaacaaacagcgatcacagagaaatttccgaatcgctatggttttcgtgtttctcctgatgccaacaaattggagattaagaaagctgtagaggatatgtacagtgttacagtagttgatgttaacaccatcaactactctggaaagcgtaaaagccgttatacaaaatcaggtatcatcaacggcaagcaagctgctttcaagaaagcgatcgtaacgttgaaagaaggagaaacaattgatttctttagtaatatctaaaaagagaaatgggaatacgtaaattaaagcccacgacaccggggcagagacacaaagttattggtgcatttgataaaatcactgcaagtacaccagagaagtctcttgtagtaggtaagaagagtacaggtggacgtaacaacactggtaagatgacaatgcgttatatcggtggcggtcacaaacaaaagtacagaattatcgatttcaagagaaacaaagatggcattcctgcgacagtaaagtctatcgagtatgatcctaaccgttcatctcgtatcgctttgttgtattatgcggacggagcaaagagctatatcatcgctccgaacggattggaagttggccaaacagtggtttcaggtagcgacgccgctcctgaggtaggtaatactttgcctatggcaaatattcccgttggtactattattcacaatattgagcttcgtcctggacagggtgccaaaatggtacgttccgcaggtgcattcgctcagctgacttcaaaggaaggcgcttatgcgattattaagatgccttctggtgaaactagaaagattcttgcggcttgtaaggctacaattggcgcagttggcaattcagaccatgctcttgaaaaatcaggtaaggccggtcgctctagatggttaggtcgtcgtcctcgcaaccgtggtgttgttatgaacccggttgatcacccaatgggtggtggtgaaggtcgttcttccggaggtcatcctagatcccgtaatggcttatatgctaagggcttgaagactagagctcctaagaagcattcttcaaagtatattattgaaagaagaaagaaataatctgattaattaagtaaactatgagtcgttcgctaaaaaaaggcccgtatattaatgtaaagcttgagaagaaagttctggcaatgaatgagtcaggaaagaaagccgtagttaagacatgggcaagagcttcaatgatttcgcctgatttcgtaggccatactattgcagttcataatggaaataaatttattcctgttttcgtaaccgagaatatggtaggccacaagttgggagagttctcaccgacacgtactttccgcggtcacgccggtaacaagaagaaataatatcggtagtaacaggaattcaggaatctgaaaataaaaagaatcgaataaaatgggtgctagaaaaagaatatcagctgaagcaagaaaagaagcccaaaagaccatgtatttcgcgaagttgaacaatgttcctacctctcctcgtaagatgcgtttggtagcagacatgattcgcggtatggaagtattccgtgcgcttggtgttttgaagttttctaacaaggaagctgcagcaagagtagaaaaattgcttcgttcagcaatcgcaaactgggaacagaaaaatgaacgtaaagcagaagcaggagagttatgcgtatcttcaatcagcgttgattgcgctactacgttgaagagaatgcgtccggctcctcaaggaagaggttacagaattcgtaaacgctcgaaccacgtaactctgtttgttgatacacttagtaaaaacgatagtcaaaattaatttgtagatgggacaaaaggttaatccgattagtaatcgtttaggaattatccgtggttgggattccaattggtatggcggtaagaattacggggatactttgctggaagatagcaaaatccgtaaatatttgaatgcccgtcttgcaaaagctagtgtatctcgtatcgttattgaacgtacgcttaagttgatcacgatcactgtttgtacgtcacgtccgggtatcatcatcggtaaaggtggtcaggaagttgataagttgaaggaagagttgaagaagatcactgataaagaagtgcagatcaacatcttcgaggtgaagagacctgaattggacgctgttatcgtagcaaacaacatcgcacgtcagcttgaaggtaaaatcgcatatcgtcgtgcggtaaagatggctatcgcctctaccatgagaatgggcgccgaaggtataaagattcaaatctctggtcgtttgaatggcgctgaaatggctcgttcggaaatgtataaggaaggaagaactccgttgcacactcttagagcagatatcgactatgctttggctgaggccttgacaaaagttggtttgctgggtgttaaggtttggatctgccgtggtgaggtttatggcaagcgcgatcttgctccttctttcactgctgccaaggagacaggccgtagaaacgacaatgccggtggcaacagagacaagaacttcaagagaaaaagagctaatcgttaaacgttagaatttaagtagagatgttacaaccaaagaaaaccaagttcagaagacagcagaaaggtcgcatgaagggcgaagctcaacgtggcaaccagctggccttcggttcttttggaataaagtcattagagaataaatggattaccggtcgtcagatcgaggctgcccgtatcgccgttacacgttatatgcaacgtcaggggcaggtttgggttcgtatcttcccggataagccaatcacgaagaagcctgcagaggttcgtatgggtaaaggtaaaggtaatcctgagggatttgttgcgcctgttactccgggtcgtctgattttcgagatcgaaggtgttccctttgatatcgctaaggaagcgttgcgccttgccgcacaaaaacttccggttacaaccaagtttgttgtgagacgtgattatgacatgcaaaatcaaaatgcgtaattgttatgaagattgcagaaattagagaactaagcacgaaagagttgctagagagagtagatgcagaggttgcggcctatgatcagaagaagattaaccatagcatctcgcctatggataatccttctcagattaaacagcaacgcagattgattgcgcgcatgaaaacagaattgcgccagagagaacttaacaacaaataattgagcctgatggaaactagaaatttaagaaaagaaagaacgggcgtggtaacgagcaacaagatggataaaagcatcacggttgccattaaatggaaggaaaaacaccccatttatggaaagttcgttaataagacgaagaaatatcatgctcacgacgaaaataacgaatgcaacattggcgataccgtaaagattatggagactcgtcctttgagcaagactaaaagatggagattagttcaaataatcgaaagggctaagtaagatgatacaacaagaatcaagactagtagtagcagataacagtggagctaaggaagctttgtgtatccgtgttttgggcggaacgagaaagcgttatgccactgtaggtgatgtgatcgtagtagcaatcaaaagcgtaatcccagctagcgacgttaagaagggtgctgtttctaaggctatcatcgttcgtactaagaaagagatccgccgtccggatggttcttatatccgtttcgatgataacgcttgcgtattattgaatgccggtggcgatatccgtggtagccgtatcttcggtccggttgccagagagcttcgtgcaacaaacatgaaaattgtatcacttgcacctgaagtgctttaatctcgtaaaatttaaagtaatgagtaaattacatatcaaaaaaggcgatatagtatttgttaatgccggcgaggacaaaggtaagacaggtcgtgttttacaggtacttgtaaaagataatcgtgcgattgtcgaaggtattaatgtggtatcaaagcataccaagcctaatgcgaagaatcctcaaggaggaatcgaaaagaaggaagctcctattcatctttctaaccttaacgtggttgacccgaaatctggtaaagctacacgtatcggccgtaagttgaatgagaagggtgctttagtgcgttattctaaaaaatcaggggaggaaattaagtaatgagcaatactgccagtcttaagaaagaataccaagacagaattgttcctgccttaacgaaggagttcggttacaaatccgtgatgcaggtacctgttttgaagaaaatcgtgattaatcagggattaggtatggctacggctgacaagaagatcatcgatatcgctatcagcgagttgtctacgatcaccggtcaaaaagctgtcgctaccgtatctaaaaaggatatctctaactttaagttgcgtaagaagatgccgatcggtgtgatggtgacattacgtcgtgagcagatgtacgagttcttggagagacttgttcgtgtcgctcttcctcgtatccgcgacttcaagggaattgagagtaagttagacggaagaggcaattatacactcggtattcaggaacaaatcatttttcctgaaataaatatcgataatattaccaaaatattgggaatgaatattacctttgtgacctctgcgaaaacagacgaagaaggttatgctcttttgagagaatttggattgccttttaaaaacggaaaaaaagactaagtagttatggctaaggaatcaatgaaggcccgtgaggttaaaagagcaaagcttgttgctaagtatgccgctaaaagagctcagcttaaggcagaaggtaactatgaggctttgcaggctttacctaaaaatgcttctcctgtacgtttgcacaaccgttgcaagattacaggacgtccgaaagggtatgtacgccagttcggtatttctcgtatccaattgcgtgaaatggcatctaatggtttaatcccgggtgtaaagaaagcaagttggtaagagtttttttagtttaaatattgtccgggtggccggatcaatttaattaattatttatatgacagatcctattgcagattatttgacaagattgcgtaacgcaatcaaagcgaagcacagagttgttgaggtgccggcgtcaaatttaaagaaagagatcactaagatccttttcgacaagggctacattcttaattttaagtttgtagaggatggtcctcaaggtacgatcaagatcgccttgaagtatgacctagtaaacaaagttaatgcgattaagaaacttgagagagtttctacgcccggtttgcgtaagtacactggttacaaagaaatgccgagagtattgaatggtttaggtattgctgttctttctacttctaaaggtgtgatgactgacaaagaggcccgcgatctgaagatcggtggcgaggtattatgttacgtttattaattaggagggaagaagaatgtcaagaataggaaaattaccaattcatgtaccggctggtgttacagttacaattaaggataatgtagtaacagttaaaggccctaaaggtgaacttgtacaggaagtgaatcctgatattaacgttactttggaagacggagttatccatttaacaagacctactgatgataagaatcatcgtgcgttacacggtttgtatcgttctttgatcaacaacatggttgttggctgctcagagggatataagaaggagcttgagttagtaggtgttggttaccgtgtttcaaatacaggtcagttattggatctttctttaggttatactcacaatatctatttgcagttgccgaaggaagtgaaagttgagacgaagtctgagagaaataagaaccctcttattatccttgaatcggctgacaaacaattattaggtcagatttgtgcgaagatccgttcattcagaatgcctgaaccgtataaaggtaagggtattaagttcgtgggtgaagagattcgcagaaagtctggtaagtcagcaggtaagtaatctacgtaaactgaaattatcatgacaacgaagctagaaagaagattaaaaataaaagcaggcgtacgcggcaaaatctcaggaactactgagcgtccgcgcctgactgtgtttagaagcaacaagcaaatctacgcacaggtgatagatgatactacaggcaagactttagccgctgcttcatctttgaaattagatgttaaggctccgaaaaaggagatcgctgctaaggttggtgaattaatcgctaaaggcgctcaggaagctggcgttcagacagtggttttcgaccgtaatggttacctgtatcacgggagaattaaagaattagcagatgctgcacgtaacggcggccttaaattttaatgaagatggcaaataatagagttaaatcgaccaacgacttagagttgaaggacagactggttgcaatcaaccgtgtaactaaggttacaaaaggtggacgtacattcagttttgctgctatcgttgtagtaggaaacgaggatggtatcgttggctggggattaggtaaagccggtgaggtaacgacagctatcgctaaaggtgtagaagctgctaagaagaacttgatcaaggttccggtacacaaaggtacgatccctcacgaacaattagctaaattcggtggtgctcaagtgctgattagaccggcatctcacggtaccggtgttaaggctggtggtgctatgcgtgccgtattggagagcgtaggtattacagacgttttggcaaaatctaaaggttcttccaaccctcataacttggtgaaagctactatcgctgcgctaggtgagttgagaagcccgttcgatgttgctcagaacagaggtgttgctgttgaaaaagtatttagaggttaattagggggggataagtttatggcgactattaaagtaaagcaagttaaaagtagaattaaatgcccgaaagaccaaaagagaacgcttgacgcactagggctgagaaagatgaaccagattgtagagcatgaagctaatccggcgatcttaggtatggttgagaaagtgaaacatttggtttctgtagaaaagtaataattggttgaaaaaataaattatacgatatgaatttatcaaatttaaaaccggctgaaggatctaccaagaccagaaaaagaatcggacgtggtccgggttcaggattaggcggaacttcaacaagaggtcataaaggtgccaagtctagatctggctacaagaacaagattggtttcgaaggtggtcagatgcctattcaaagacgtttgcctaaattcggtttcaagaatattaaccgtgtagaatataaagctattaatatcgatactttgcaacaaatggcagaggctaagcaattgactaagattggtattaatgaattgatggaggctggtttcatctcttcttctcaagtggttaaaattcttggtaacggtagcttgaccgctaagttagaggttgaggctcacgctttctctaagagcgcagaggcagctatccaagccgcaggtggaacagtcgttaaactctaagtcatgagagctgttgaaacaatcaagaatatctggaagattgaggatctgagaaatcggatcctcaccactcttttattggtggctatataccgttttggtacgtatgtagtgcttccgggtatcgatcccaaagcgttgaccgctttacaggagcagacaagaggcggattgcttgcactgttggatatgttctcaggtggagccttttctaacgcatctatttttgcgttgggaatcatgccatatatctccgcttcaattgttatgcagttgttagccatcgcagttccttctttccaaaaattgcagagagagggtgagagtggccgtagaaaaatcaatcagtggactcgttacttgacgatagcgatcttgttattccaaggtcctacttacttggtgaatttaagcgttcagcttaaggctgccggcgctgctttaccgggtggtatttggttcacgatctcatctacgatcatcttggctgcgggaagtatgtttatcttatggctaggtgaaagaattacagataaaggtgttggaaatggtatttcatttatcattttagttggtattatagcccgtctgccgcactctttgttccaagaattcgtttctagaacaagtgagaaaaccggtggtctggttatgttcttatttgagatgttgttccttttgcttgttatcgctggtgcgattttattggtacaaggtactcgtaaggtccccgtgcaatacgcaaaaaggattatcggtaataaacaatatggtggcgcacgtcagtatatccctttgaaggtgaatgccgctaacgtaatgcctatcatcttcgctcaggcgatcatgtttattcctatctcaattgtaggtttctctagtacgggagagcagagcggtttttgggctgctttcatggataatacgggattttggtacaacttcgtgtttgcggtgttgattatcctgtttacgtatttctatacggctattacgatcaatccgacccagatgtcagatgatttgaagagaaacaatggttttattccgggtgtgaaaccgggtaagaataccaaagactatctggataccattatggaccgtattactttgccgggtgcttttttccttgcgttggttgctatcatgcccgctttcgctagaattgccggtgtaagtatggagttctcccaattctttggtggtacatctttgttgattttggttggtgtggtgttggatacattgcagcaagttgaaagtcatttgctaatgcgtcattatgacggtttgttgaagtcaggaagaattaaaggccgtacaggctctgttgccgcttattaatagaatgatctatttaaagacagatgaagagattgagttgatgcgtgaggctaatcaactggtaggtaagacacttggcgaggtagctaagcatattgtccccggagtctccacacttcaacttgataagattgcggaagagttcattagagataatggtgctgttccggcttttttgggatatggtggtttccctaattcaatatgtgcctcagtgaatgatcaggtggtgcatggtattccttcttctaagatgatcttgaaagagggtgacgtgatctctgtggattgtgggacgatattgaatggttttgtcggtgactccgcttacactttctgtgtaggtgaggttgcgccggaagtgaagaaattgttgaaagcgacgaaggattcactttatttaggtatccaatgtgctgttgaaggtcaccgtttgggtgatatcagtaatgcgattcagacttattgcgagtctcaaggttactctgtcgtaagagagctggtgggacatggtataggtcggaaaatgcatgaggaaccggaagtgcctaattatggcagacgtggatgcggaccgttattgcgtaacggaatgtgtatctgcatcgagccgatgatcaacatgggaagcaagaacgttgcatttgagaaagacggatggacggttcgcacaaaggacagaaagccttctgctcatttcgagcattgtatcgctatacgtccggatggtccccagatcttatcttcatttaagtttttagaggaagttctaggagaaaacgcaatttaattggatttatatggctaaacaatcagcaatagagaaagatggagtaattgtagaagcattgtcaaacgcgatgtttcgtgtagaattggagaacggacatgaaattaccgctcatatctcaggaaagatgcgtatgcattacattaagatccttccgggggataaggtaagagtagaaatgtctccgtatgatctatcgaaaggtagaattgcttttagatacaaataaaattaaacacgatatgaaagtaagagcatctttaaagaagcgtacacctgagtgcaagatagtaagaagaaagggtcgcttatacgtaattaacaagaaaaatcctaagtataaacaacgtcaaggataatttattatttttgcaaaataatctaagtaagtaatatggctataagaatagttggtgtagacttgccacaaaataaaagaggagaaatcgctttgacttatatctatggtattggtcgtagcgctgcaaaatccgtattagataaggctggggttgatcgtgatatcaaagttaaggattggacagacgatcaagccgcaaaagttcgtgaagtcattggcgctgagtacaaggttgaaggtgaccttcgttcagaagttcagttgaacatcaagcgtctgatggatattggttgctacagaggtgttcgtcaccgtgttggtctgcctttgagaggccaaagcacaaagaacaacgctcgtactcgtaagggtaagaagaaaactgttgcaaataagaaaaaagctactaaataataagagttaatatggcaaagaaaacagtcgcagcaaagaagagaaacgtaaaagttgacgcttacggtcaagctcatattcattcttcttttaacaacattattgtgtctttagcgaatagcgaaggacaagtaatcagctggtcttccgctggtaagatgggattcagaagctctaagaagaatactccttatgcagctcagatggcagcacaggattgcgctaaagtagcttatgatcttggtttaagaaaggtgaaagtattcgttaagggtccgggtaacggtcgtgagtccgctatcagaacgatccatggcgcaggtatcgaggtaacagaaatcgttgatgttacaccgcttcctcataacgggtgtcgtcctccgaaaaagagaagagtataattaattatagtttcttaaacattgaatccggaattgtgaatagattgcatattgaccttatcctctctgtaatcgcggctgcacggttccagattcaaacagaacatttaaaaaaataaaaaaatggcaagatatactggaccaagaacaagaattgcccgtaagtttggtgaggcaatattcggtgcggataaagttctttctaagaagaactatcctcctggacaacatggtaactccagaaaaagaaagacttctgaatacggtatccagcttcgtgagaagcaaaaagcaaaatacacttatggcgtattggagaagcaatttagaaacttattcgaaaaagcttcacgctctaaaggtattaccggtgaggtgcttcttcaattgttagaaggccgtcttgacaatgtggtttatcgtttgggtatagccccgacaagagccgcagctcgtcagttggtttctcatcgtcacattacagtagacggaagtgttgtaaacattccttcttactctgtaaaacccggtcaggttattggtgttagagaaaaatctaaatccatggaggttattgccgacgcattgtcaggtttcaatcacagcaaatatccttggattgagtgggatcagtcctcaatgagcggaaaattactgcatctgccggaaagagctgacattcctgaaaacattaaagagcagttgatcgtagaattgtattctaaataataattgatttccatggcgatattagcatttcaaaaacccgataaagtattaatgttggaagcggacaatttcttcggaaagtttgaatttcgtccgttggaacccggctatggtattacaataggtaatgctttacgtcgtattctcctgtcgtcacttgaaggttttgctattacatccattaagatcgacggggttgaccatgaatttggtacaatcccgggtgttatcgaggatgtgacaaacattatcttgaatctgaagcaagttcgtttcaagcatatcgtagacgacatcgagaatgaaaaagtgagtattactgtttcgggttcggaagtgttcaaagccggtgatattggtaagcaactgactggattcgagatattgaatcctgatttggttatttgccgcttggatccgaccgcaagtttccagattgaattgactattaataaaggtcgcggttatgtacccgcagatgagaacagagacccgaacgcagatatacatgtgatcgctatcgactctatcttcactccgatacgtaacgtaaaatattcaatcgagaacttccgtgttgaacagaagacggactacgagaagttggttcttgaaatagccacagatggttctattcatccgaaggaagcgttgaaggaagcagcgaagattctgattcatcatttcatgttgttctcagatgaaaagattgcgatcgagacagcggatactgaaggcaatgaagagttcgatgaagaagtacttcatatgcgtcagttgcttaagagcaagctggctgatatggacctttccgttcgtgcattgaattgcttaaaggccgcagatgttgaaacactaggtgagttggttaagttcaataagaatgatttgttgaaattccgtaacttcggtaaaaagtcgctcactgaacttgatgaactgcttgagagcttgaacctttcattcggtatggatatcacaaaatataaattagataaagagtaagtaaacgatgagacataataagaaattcaatcatttaggtcgtacaaatactcaccgtgacgcaatgctttcgaatatggcttgttctttgatcaagcataagagaatctttactacgacagcaaaggcaaaagcgctacgtaagtatgtagaaccacttatcacgaagtctaaggaggatacaactcactctagacgtgtggtatttagcaatttgcaagacaaatttgctgtaacagagttgttcaaggaaattgctcagaagatcggtgatcgtccgggtggttataccagaattatcaagactggtaaccgtttaggtgacaacgcagctatgtgctttattgagttagtagactataacgaaaatatgttgaaggatacagccgctaagaaagctcctaaaacaagacgttctcgtaaaaaagcaacagcatcggttgcagaagctcctacagctgaagcagctagcgaggaaaaagcagctgaataagcaagttttttataatcatataagaaaagcgattcgtacacacggatcgctttttttgttgaggtatagtgcaaatatagcagtgtaaagaaatatgaagtttataattgtttttattgtatgctttgaagagcctcctgcgctaccttattagaaggatcgatctctaagaccttattccagtatatttttgaattgtccagatctttttgaggtaatagaaatagcccagataacgatagtattcggctagtttcactgcttttgagagattctctaaagatggttcatattgctgagtcgcatttaataagcggtcttggtataaataatcttgccaaatgaactttccattaggcgtgttgaaaaatccagaggtttgttgtatgccattatcataatctttcgtctcgaaagcgttgtacaaattcagacgttgcggtaagaaattatccggttcagtggaaagcccttttgcgatgacttctccatcctcttgatcaaaagagtatccggtatggtgattatcatcaatatgatcttcacaagaagagcacaggcaagctttatattccggagggacagatgcggtatccgcataaatgaactcccctttgccaaacagcaggaataaatctagaagagtcaatagtggtaagtacctttttcatcttagtatgagtatattctttcataaacaacaaaagctttttttgaaaggtttaggcaaatagtaaaaatcatctattaaaagattgaaaaactcgataggcttccgcaaacattccttgcttggctattgttatatttgtgaaaaagaaaagtaagacatcattgaacaactaataaaacaaatatagtaatatggaaattgtaaaagtagtaggtagagagatacttgattcacgtggtaacccgacagtagaagtagacgtacatttggcttccggcgcattcggtcgtgcggctgtaccttctggcgcctctaccggtgagaacgaggctatcgagttacgcgatggcgataagaatcgctacggtggcaaaggcgttctccgtgccgtggataatgtaaataaggtaatcgctcccgccattttaggaatgagcgccttgaatcaaagagagatagaccataagttgctggatttggatggtacaaagacaaaatcaaatctaggagctaacgctatgttaggtgtatcgcttgccgtagcgaaggcagcggctaattatctggatctgcctttatatcgttatatcggtggaacaaatacctacgtgttgccggttcctatgatgaacattatcaatggaggttctcactccgacgctccgatcgcttttcaggaattcatgattcgtccggtaggtgcgaagagtttccgtgaggggcttcgtatgggcgcagaggttttccatgcgttgaagaaagtattgcacgatcgtggcttgagcacggctgtaggtgatgagggcggtttcgctccggcattggatggtacggaagatgccttgaattctattatggccgctatcaaagccgctggatatgagccgggcaaggatgtgacgatagccatggattgcgctgcttccgagttttatcacgatggtgtttatgattatacggaattcgagggtgagaaaggcgctaagcgtaacgcccagcaacaagtcgcttatctgagtgagttggtgaacaaatacccgattgattctatcgaggatggtatggacgagaatgactgggccggttggcaaatgctaacctccacgctaggcggaaaatgccagttggtaggtgatgacctattcgttacaaacgtagagttcttgaagaaaggtatcgagaagggttgcgcgaactccatcttgatcaaggtaaaccagatcggtacattgagcgagacattagacgctatcgagatggcccaccgtaatggctatacatccgtgacttcccaccgttccggtgagacagaggatgctacgatcgccgatatcgccgtagctaccaacagcggacaaatcaagaccggctccttaagccgttccgatcgtatggcgaaatacaaccagttgcttcgtatcgaggaggaattgggttccttggctgtttatggttataagacttataagaagtaattttcattatttgcttgagaaatgggggagttcacctatcaaggtggactccctttttctttttagtggaaaaaacgaagcaaacctactaatcaatagccagcctgctccaaacatttaatgattataaatctattgccctaaataagagagtgaatgttgtatctcttctctagagaccgagaagttcctgttcccggccaatttatttaatacgagtgtgcctatgttttctgcgctttccttatccgggaacgcaattaccgtatcaatagagggaatggtgggttggtaaatcaacacctttccgttcatcctaatctggtacccccagccatcccccgattgaaatgtttgcaactccagttgccgcccgggagaagaccccatttcttcaccccggaaaaaagataaataaaacagtaataccggcagtaccactaggcccggtacgaaccaagcccgtcctttcttagtattcatcatcgtcatattcattcgggtgaaattcccaaatatcatcaaattgagtggtaccacttttgccggatactacgaatcctttctcgccagaggagaaagatgctgtcgccgtacgggcagttcccttgaatttagctacgttttcccatagatcggtggccggataatatttccaagtgtcgctacgtaggcttccgctctcaccgcaagtcagataagcggctccatcaatcacgaaagcaaccccgttcgtacgtgtgatcgtataatcatcgtcataatcctcgtccgaggaatccgatatatccctaagttgggtccatgattccgtgctgggatcgaatttccagaaatcgtctacatattcgccgttattttgtccgcaacatacataagcgattccatttatcacgaagctggtagcgccctgacgctttgtcccgccgatactgatcgtttgcgtccagctatttgccaccggattaaaggcataaaagtcttttaggtaattcccgtcgtatccgcatccgatatacgctttaccgtttaccccgaaggccacggctccatatcggcccgagccggggaaatccgctttctgtgcccacgtattggtggtcgggttaaattcccagaagtcgttcaagtaattggtaccgtcgtatccggttcccagatatcccttttcatctaccgccatagctacggccgaattgcgggcggttccgggaaagtccgccttttgcgtccaagtatctcgttccatatcatattcccaacaatccgataaacgattttttccgtcgtttccgcaaatcagatatcctttgttaccgatcgtgaaagaggaggcgtaatttcgcgccaatccgtccatgtcagagacacggtaccacttaccgatcaaatcatcgtcatcgtcatcactgcaagcgctgatgatgacaggaagaaaagcgatcaagaatacaagaatccttttgtgtatcattctaactacgtattttgtttttacggaagcaaaagaacgagggttttacgagacccacaaattaaatcggtaaacatacggtttttatcggtgaataagccggattgataggttagggcctcgaatggttttgaaatcggtttcatcttcagtatcgggccgtttacagaggaaaccggtgggttcatgggtttatcttgccgggttttgcactaaatacgttctttgccatcggattgataaaagattattcgcttattaaataagaagtatggttagaacattctttgctttggggggcttgatgctctgtctgggactgttttcctgttatgacgagaacggtacgtatggcagcgatctggtggactccgctttccgtaacgttcgtatagataccagcacggtcgtagtgacctcggtattgatcgactcgttggagacatctggtaagaacgtcgctttggtaggccggtacaaacattcattatggggagtcgtctcgtcgcatagctttatcgcttatgaaagacctagctatgggactgatccggacgagacggtcgtactggactcgctagtcctgtctctcgctttcgacggtcgctttgtaggagacacgaccctccaacaaaccctctcgatttatcagctaacggagaagatcgtcttaaacgataacgggtatttatataataatagcagtgtctcttacgctcccgaggctttggcggtctgctcatttaaaccgaagccgaaggggggggagaaactggaagtccgtcttcccgatgcgctagggcaagacctcttgtcccgttttcatgcgcaggatcaagcggtgtccgaggagcgctttgaggattatttcaaaggggtggcgatcgtgccggacttggcgggaagcgagtctctgctgactttcacggtagccgattcctccgccgctttagtcctgcattatcatttgtccgatgagctttccacagagaaggaattatggttcttcccgaatacggatacccagttcaatcatattgaccatgaccgtagtggaacggatatggcaggatatccgatgaaaggagtggagataccttcggccgagcttggtaaccggggcgtattattcggaggcttgggttggtatacccgtctggaattcccgtatttgaataatctgatgcaacaaggcacgcaagtggagattgagagcgctttacttaagatttatcccgagcaaggcacttattcggattacaataccttgccggacagcctctacctatatatcgccgatgagaataatgtggtgacggatgccgtgaccgattatctcggttccgaggttcaacgaggtacgctatcggaagacaatacgtttaacgagaacacctattattatttcgacgtgactcaattcatgcaagaggagctaggtgcctttggcatgtataagcataatcttcagttggtttttaatagtgatgattacaccggcacgttcaagaacttgacgtttaacgatcagggaggacgtaacccggtcaccctacaactcatttataaggtctatgaaagttactagataccttctttacccttgcctcttgatggcggcaagcgcatccgcgcagaatacgatgacttcctcgccttactcgatgtttggactgggtgagatggcttccggtttatatggtcaaaatacctcgatggcgggtgtcactgtcggcatgcgggaagggatgctgatgaatatagagaatcctgccggattgacagcgttggatagttgtaagttgttcgctgaggcatctgccttcgtgaagaatgaacgataccgctcagacgggagctctagcagcgcattcaccgggaatttctccgctttctcattgggagggcgtatcatgcgacggtggtatatgtccgtcggggtaactccttatagtttcgttgggtattattttaagtcctcgcaagagttggaaggatctcccggaacctttgtaaccagtacgttttcggggacaggcgggctttccaaggctttcctttcccagggatttttattgaccaagcatctatcagtcggtatgaatcttaattttatcttcggaaatatgacactgaatgagatacaaagtgcgatgacagtgtcaagggagatgtccggccgctctttttacgccgatttcggtttacaatatcatcgtccgatcgcccgggaaacctttctaacggtcggcgccatttacggttataagcaacggatctcattgaaaaatacggtgacggtgacgggaagcagcacggaaaccccctataaccagaaaagggtgacacaatatctacctcaatatataggcatcggtagctcattggcgcataaaaaatggacgtatgcgttggactatctattccggcaatacggggtattgaactcgagcgatagccgggtaaagttccgggattcgcatgagctacgcttgggcgtatgctatttcccgaatggatttagctccagcagttattggaaacggatgtcttataaagcgggtgtttctgtttccacgccttacctgcggttgaaaggacaatccggcggggcgtatcgggtaagcgttggcttgggattacccgtcctgaatggccgtatcaatacggcgttttattacgatcgtctccaattgcaagggaatgcgttgcgaagagatatcatgggctttacggtgacctatacattaagcgagaagttctaccaagtgaagctttagttttctgcctatgaaactaaagtttcttcactaggaaacaaaagttttgtcacggagaaacaaaagtttcttccgcatgaaactcttggttactcttggagagccagattattcatcaaggcgggcaggtacgaatcgctgatagggatcagttcctccccgatacgtatccgcttgcgctcgatataattaatgtgggagagggatacgatgtaagaacgatgtacccggcaaaaacgattcctgtccagaaactcctcgaaccgcttcaagctgacttgcgtgagcaggggcttgccattgatacggtgtacctttacataatcgccgtatccctcgaggaaaaggatctcttcccggcgaaggcgaatgatcttgctgccctcccggacgaagatggggcgttctgtttgctccttgctcagcacttggtggacatcggccaaagccttgtccagtttctcgagatatcccatgagcgtgttcagggtcgaggcgtctccgtcgaaagtgatacatttcagcatagtgtttttacctttatttgttgtaccgcgaaataacaggaaagttcggtaaagaaaggttaagcgccgattagtggtataatcgggtcggtgaatcgccttacgggagggggtgaaaagacattattcctcttccctcagaatccatttcttgaagatcggggtcttggtcttgctgatgatgatacgttcgggaaccggcaaggtgaggttgacggacaggcggctcccgaaccaaagatctatatccttgatggcgttgcgtgaaatgatgaattgacggttggcccggaagaaaagcctctcgtccagttgctctcccaacgcgtcgagggtacggtctacgggatgttgcttcccgtcggaggtataggcggtaaccttctcgttggccgtatagaaataaaggatctcctcaaccgccaacggatagaatttatcggccagcatgatcaacaggctcttgatcgtgtggcgactctggatcgtacggttcgtttgccggatatgcgccagcctttcctcggtatcgaacagccgtaatttattcaaggccctttccagcgaggccagcgtgacaggcttcagtagataatcgatactgcttacttgaaaagcctgtaacgcatactcatcgtaggcggtcgtgaagactactggggcatctatctccacctgctcgaatatcttgaacgccgatccgtccgctaaatggatatccatgaagatgatatccggatgaggcgatgtccggaagaaatccacgctctcctcgatactctccaactcggcgatcacttcgatctgagtaaccgtattttgcgccaagatcgcctttaggctattaacggcggtagtctcatcttctataataactgctttcatgagtgaatgggtttattaagtaaaggaagcgtgaccttgaaatattccttgcggttggagatctggatgtcctttccggtaagcatccggtagcgcccccataggttcttcaatccgataccgctacctttgctatcttccgacttaggatgtattttattggatatgattagtttgtcctcatgggtggtatagatatcgatctgtagtgggtattgcttgctgataacgttgtgctttacggcgttctcgatcagggggagtacgctcaatatcggcagataccaaagcaagtaaggggtatccgcttggatggagaagaatagctttccctcgtagcgcacgcttagcagataggtgtacgcctttacgaattgaagttcttccgctagcgtaaccagctctttcttgttgctttgcaagatataccggaagacgttggatagctcatccagataagccagcgtctgttgtttctctccgctctgtatcaaggcgttcaatccatttaaggagttgaagaagaaatgcgggttgatttgtcccatcaaggcgttataggaattctgtagcttctcggtcttcaattgctcatattccagtttcatttgctgcttgctgcccagcagccggatcagtatggagcttagcatgaccgtgaggaagacgaaaagatgctccgtcatgaaagagttagggaccgtgaaaggattgggcggtaccggtatgtcccgatgctcggcaggcctgatggtttgcgtagccatcctgtcccggttgatgcggatcatgatatcccgggtagctggctgaggtccgtcttctcccagccattctacaacaatggccgtgtacaaaaccggcgacagatgaaacatgccgtaggcgatgctgatacaagttacgcaaaccaccaatacccttttatactctttcctgcggaaaagcttgtccccgaacttatacatcaagctgttgacaataaataagatgaaggagaacacgaagaaccagattagcaaataatacatggtgcgatccggaggctggatacccatgctcgggtttccggtctcgaactcatatttacgcatcagaagggcgaagttcacgaaaatactaagcaagacggatatcgtgaagccgatcaataagtcatttctttttaattgtaacatagataaaccctttgtctgcttacaaagataaggcttccttatccgagcgggaaaaggaatcgacgaaacggataaaaatatcggtgaatcgcccgggcttccgaaaataatgtacctttgccggaaattaggatctctgtcgctatgacgaaatggtttgcctacatattgctggccagtgtctgcctgttgctttcctgtggcggtaaatccgtacgggagaaatttgcggaagcggaccggttggtaaacgagaataacttagatagcgccgcttggctgctggaggagcaaataacgctttccgctctttcggatagcgataaggcagagtatggacggaggctcgcttggcttcatctcttgcaggggcgcagcttggtgaacgactcgctcatcgactactccgtggattattataaggagcatgcctcggagcctttactttccgcttatttcgtaaaggctatttacatgggtgattcccggaaggggttggaacaaagacgtgccttgtaccgagaggcgatagattccgcttactcccgttcggattcgacctaccttgtacgtttttatgaccgattgacttccttgagttttggtgaggggttgtatcgggaaacgatcgcagagtcgaaggaatgggaagcctcgccaaaagctggatttaaggagatggcctattatatggccgggttgagttatagccgcttgcgaatgagggactcggcggattattatcttcgtttggctgcggactcggccttggctaagaatatcgaatggtatgcccatcattttgcccgtaattacgcggatttcttgtatgactttaatcccaaggcttctatcagatatctgcgtttgctgaaggaacgttatccggaacgagaaatcttgggatcctatgttatgccttggatcaatctaggggagctggattctgcccggaagtatatcgagaagaatacgttagacttggagcgtagtcacagcgatgatatagcctcgcatgcgcttaattatgcctatcaatttatattgggcgtaaaggaaaataagccggtcgatatttcccggttagggcaatattgcgattctttgtataccgtgaaatcccaaacggagaaggctgagcgggaacgattagtcgatcaaaatcgtttacgccgagaaaatcttcgcttggagatgagccggcagcgtacgttctctatcttagtgatcgtttccttgctttccatattggtagctggtggagtttccttatatatccgtaaccgaaggaaccgtttgattgatatggaggagcgtttggaagccttgcgtcagctcttgaacgagtccaagcaatccgtagcggaggaggagaaacccgatagtgcctttttccgtaaggtcttgttgcagcaattgggtgttatccgcttgatggcgactactcccacgcaacaaaataaggaattgctccagcaaatgactcgtatcacgaatgaggatgtcccggtagatacgcttttggtatgggatgacctgtatccgattatcgatgcggtctatgataatttccatacgcatctggtccgattgtctgacgggcgtttgctggaaaaagagatccagctttgttgcttgctatgcgccggcttctctaccaaggaaatcagtgtagtcacccaacaaagcgtccgtacgatctatcagcgcaagacggacatccgccataagctgggtatggatgagaaagaggatatcatcggcaatataagtgctcaaacggcaaatataaacttttctctctaagtcgttcgctaatactttgtaaatcagtatatgaacgtaatgccttgcactttagtttcttgcctgtataaatcgattttagctgtttccctccttacatttgtctcgaatcaaatttgaattttatgagaagacaagtattatttgtgggattgatttgcgttgcctttttggtaaatgcgcaagaggagaaaacgatcgatttggatgaggttaccattcaagcctcttcgattataaggaagaaagaccgtcaacttatattcccctccaaagaccaagtgcggcgctcgatggatggcttggatttgacaaggcggatgtctttacctcgcctatgggtagatccgaatacgaaaagtatctctatggcgaatggaaacgttcagttgcgtataaatggcgtgttggcttcttccttagaagtcgccgccctctcgccggaggatatcaaacgggtggaatatcacgataaccccggcttgcgatatggggaaggaatcgatatcgtcttggattatataacgatcaagcggacttccggaggaaatctcggcgtggatttaagccatcaattaaacacgttttggatggcagattatatatatggtaagtataaccggggacgttcggaattttctttatccagctttgcgaacggacaccggtataaagaggcatggcaagaccggacggaaatctttcataccccagacggtaccttccagcgaacacaggaaggaatccccgggagggattatgagatgtattggactacgacggcgaattataactacacgaaggatgatgattatttcttgaacgctaagttgaacttgtattattacgactatccgcataactatagcgacgcccttttaagaaatagcgagagtatggctacgacccatcttatcgataataataaatccttgaatacccgtccctcgctcgacttgtattatttccggaaattaccacgtaaacaatcattggctgtcaatgtcgtgggaacttattcgaataccgatagccgtcatacctaccgggaagaactggaaagtattcctttgacagatatttatacgaaagtagatggaaagcgctattcggtaatcggagagggtatctacgagaaagagctggagaccggccgaatttccgctggtttgaaacatacgcaagcctatacggataacgtgtattccggctccggtgattatacgacccatatgacagagtccgagtcgtatatgtatgcgcaatacgtaggaacttggaagaagttggtttataatgtgggtttgggtgcctcccgtaattatctatcgcaagaaaatgtggactcctacaatcggtggtacttccgcccgcaggtgacgcttacttatactatcaatgaggtattatccgcccgttaccggtataccctgcgcaatgtaaacccatccttgtctgagttgagtaacgtggagcaatggattgattccttacaggttcgtagaggtaatccgggtctatcccctttcttatatcataacaacgccgtggaatttcatgtgaatacggcaaaggtcaaggccggctttactttctcttaccaataccagccccgcatggtcatggaagagaccctgtatgacgctagccggggactttttatccgcacctacgataaccaacggagtttccatcgctttacgccggaactctatttgaattattcacccttcggcgattatctgcgcatgaatatctccggaggcttgaaccatttccaatcgaatggaaatagctattcgcatacatatacggatcccttctatgtgatctctttgaatagcgatgtgaagaactttaattttaatctgttgatttataagagaagctatagcttttcgggtgagaccagtcgtgaggccgatcgttttaataggttgggtatcggttataggatcgggaaggttcagttaagcgcttctttctctacccaatttacctcatccgcccgttaccggagtaagaacctttcagcgatcgctccctatgtgaccgatcagcgttttggtgatatttatccgggcttcgagatcggattctcttaccacttagatttcggtcgcaaatacaaatccgtggatcgtaagttgtataattcagataatgaatcgggtatattgaatagtcggaagtaagttacatctatattgtcgattacgtgttcgcggctttcagtatgcaatatattataattgggtaggatatagttctctatcattcctacccgtttcatgcgtgcgaacacctcttggtaaggctgccccaatttgcgtgcggttccttctatacaaaaggaagcgaacgctagctctatttctgtttgcgatagttcgatttgtttatccatttttccatgtcgcttaggtggatttgcttcaaatgtacgtaaaaagcggctcatgcgataaaatccgtggatgaaattatctataaatgggaattccgtagaggtagtacttactttaccgatgaagtatatctcctgtggaacttgaagtatatctcttatagggaagggagtggtatctcgtgaaaatgacttttgatgaacccttgttttagagcatatccaaattatctgtcagcgatattcattcatgaatcgtgggcgacttggatatatgatttctttcaatgcccattctaaggttcttataatgcccatcgtaagctcctttgaatgggcattgttagatgcttacgataggcattgtaagaaacgataaacaaaaagccatccggcattccgctggatggcttttcgtatggcaatagaatcggagagattagactctcttttctttgattcttgctttcttaccggtaagggcacgcaagtagtacaatttagcacgacgtactttaccgactttgttaaccgtgatgctttcgataaacggagattcgatcgggaaaattctctctacacctacgttctcagacatcttacgaactgtgaaacgttttttgtcgccgtgaccggagatacggataacaacaccgcgatactgctggatacgctctttgttaccctctttgatacggtaagctaccgtgatcgtatcaccactcttgaatgaaggaagttccttcttcgtagcgaacgcttcttctgcaatcttaattaaatccattgtttatagctttttaattgtaatttataatgaaacgcaatttaacgggctacatttcccgacagagattacgtaaagcgggtgcaaagtaacgaaataaatatttgattcgcaatagatagatgcttttttgctcgctatttgattaaatcttttatgtctaccaaggattcaaaccattgacatccaccagcgattcccgttcctccttccacattgctgtagattcggacaggctcggccagacctacattcgtaagtccgcccatgataccttcattcttgatgttttgtaaagatagcagatattggtaatagggttcggacagggaatataaacgaatatggcgtttggtataatatttagtatcggacctaagttgttcttttacttgcaacgtgtattccttcccgtcgaacagctcgtcggaaaatacccgtccccgccaatttaccatcgaggagccgaaaacctcatccaagataccttgttgctgcgtgaatacgggatctacggagaagtccaacaggacaccaagatggtcgtcatctccccatatctgtagagaatagtaatttgatttacccggggtatcttggaaagtgatttgatagataagcacatcgttttcttctatgtaggagatattcccatctccatcgacaagggtaccgccgttgccggtagcttctttacggggaattatgcgcaggcctttgatttcggtcttggaaggaatcttatcttccgccgaggctgttccatattccggggtggaagctacaatctttacggtttgtccgggctgtggaaccgtattcgatatataaagcgtatctgttacccatccacctcgatcctctccgagccaacgagaagatttccaataggaatattctttccaaggcatctcctccttgaagatcccgtctatgtataattccaccttggcgtttcgaatcgtcacgtccggcttgctctctgagtgaaaccatgtgcgggatatgctggccattacgactgtatccggcgagaaggccgagttgatcaccattttcggtgtagtacgatattcctctaggtcaaacttcctgtagcaggaggttaggagcaggctggataataagattgataaatagaatataggtttcatgttctttagaatttataagtatatgatatagacggaatgatcggtaagagcgataacgtctcgaaataatggctgtagtttatccaagaccgcttatggatagttatcgggttcatctggcaataagcgttatatacgctgatattccagataccgagatggccgttctttttaggtcgataaatattaatccccagatctaagcggtggtaagcggggagacgtacgttattacgctccgtgaaatagtccaagcctccttccggtaagagcggagggacaggagtgaggcccaaatcctcgtaattctcgaatgccaccgtaacccggtttccggtcatgaaagtccagcttcctgttagttccaatttctcgttgatcttccagtttgcgacgatattcagcttatggcggttatcgtatttcgcggggaaacgtttgccattattaatctcgtcgaactgccggtcgctccacattagtccgtatccgatccatcctgttatacgccccgtctctttccgggcgataaactccgctccataggcccaccccttaccggcggccagtttctcctcccaaccgacgaacgagggtaagaagttgtaaccatctttataatccagtaggtgattcatccatttatgataaccttccaccgagaaggaatagttcttgtgcagattgtaataagcgccaacggatacttgatcactcaccaatggttttaatttcttgctgaccggcatccacatatcggtagggagactcatataactttcgctaatctgatgtacgtattgattcatccgggcgtatgaggccttaaggcttagatccctcgtgagcaggaagcgtacggataaacgagggtctaaggagacatatgtcttcttttgtatattgtatatgttcaggcgtaatccggcgttagcccggacaatgggagatatcgcccagtcatcttcggcgaaaacagccaactcattcgctgaaaggcgctcgtctccggtagttcgtttggtcggagacaaattcttggaggtcttttcctcgatatattccgggctgaaacgatggtaaagatagtcggtaccataacggatatgatgtgccaaggtaggaatatagtcgaagttcgcatggactccgaaatcattgataccgtttcgggttgaggtctcgataaaccgtgaagaataatctttgtcaccctcggttccgtagtattgtgaagtctcttgttttagtttggattgataatgggaataagccaaggtgacggtaccgaacatcttgttgttaaacacatacgaccagccggaagataatgcgatgttaccccagcgcatctttccaaagtccttgttctcgaaaggggttatatcatcacctacggagaactcagaacttcctccttttaggaaatcctgtccgaaatagaaattaacgtaagcttggctccggtcattgatatggtggttcacttttaggttcagatcggtaaaagcatagcgtgcgctgaatttctcccccttctttttctgaattttattgtagatcgccaaacccggtgcggataaggcatccagccaagagcgacggaaggaggcgttgaacgaagtccggtctttaatgatcggcccttcgaaatttaagttaccggaggtcaatcctagcatagcgctaccatggtactctttcatattgccatctttagtatgcacatccactacgctggaaagccttcccccatagcgggcggggaaagcggatttataaaaatccacatctttcaaagcctcggcgttgaaagcggagaaaagtcctccgagatgattgacctgatacagttggattccgtctatcatatacaggttctcgtctccattccccccacggacatacatcccggctaatccttccgttccggctgatacgccgggttgggtttgcagggctttgatcacatcagcctcaccgaataaggtcgggatggtcttgatcatcttccgggttattttaatcgttcccatctgaggggcttgtatcgggttttgtgtgtcattactaccggtaacgacaacttcggccaatgcctcaccgctttccagcagaatttccatcacggtatcccgttcgagcggttggaatgtatgtgagaaacgtccgtatccgatgtaggaagtctccagacggactaccccgaccggtaaggttagactgaagaaaccgtggttattggtagctgtgcccctttgtgtgcgagagtcataaacggaggccccgattagatattctgtagtcgctttatcccgtacgaatccgctgatggttactgagcgggggagtttcttcaagatgatgtgggtaccgtttatctgataagacagagggagcttttggaatagccgggtaaggcattccgatatggattggttatcagatttgaatgtaatccgggaaatacctttgagaatagaaggatcgtaggagaatgtcatgcctgtttgatgctctatttttttcatgatttcttggatcggttcttgtttagcctcgatactgagagtcggcgcctgtccccaagcgcttgattgaaagccgaagataatcaagattatgagtagtattagcttcatgaagtacttccttttttattacgagacaggaaagatagtaaaaacccctatcacaattcacgttactattgcgatattttcttatttttggagagtaataatgataatgttgtgatgagacagattggtatcttgcttttgtgttgtatttcccttttatcgagtggggcgcaaacagtcccgaacctttatcgtgcggtggatcaggaaaagatgaatcattgggttgattccgtgtttgacgctatgagttatgatgaacggatcgggcagttatttatggttatagcgaatcctaaatccgataaccggaatatgcaacggctcatgcgttacgtgaacgatatcaagatcgggggcatcttattccataaaggggatccggtgacgcaggcggaggtgaccaatcgtttgcaaaaggcttcccggattccgatgttggtctctttggatggggagtggggactttccatgcgattaagtggaaccacccgtttcccgaaaaacatgatgctaggcgctatcgaggacaatgccttgatcgaggaatatggaaaagaggtgggacggcagtgccgggaaatgggaattcatataaatttcgctccggatatggacgtgaatagcaatgtggataatcccgtgatcggcctgcgttcgtttggcgagaatccggaggctgtgtcggagaaaggtattgcttacgcaagaggattggaaaatacgggcatcttgtctgtctccaaacatttccccggacatggagatacttccgaggactcgcacgagacattacccgtcgtgcgccataaccgggcccgcttggatagcgtggaacttcttccttttaaacgttatatatatgatgggttcggcgggataatgacgggacatctttacgttccagctttggataaaagtcataagccggcttctttctccaaggcggtagtgacggatctattacagaaagaactcggttttcaaggtctgtgctttacggatgctttagcgatgaaaggggcttccacaaagaaaacggataatccttcggtgaaggctttgcttgcggggaatgatatcttgctcgctccggccgctccaatcaatgattttacggccgtgaaagaggctattgaagaaggggtattggatctggaagcgatcgaggccaagtgcttgaaaatattaaggtacaaatatatcgctggattgaatgcctataagccggtcgaaacaaaaggcttatcgaaacgtttgaactctccgcatgcggcatggatggcggcgaagttgaattcggaggctattactgttttgaagaatgaggatacgatcttacctcttaaacagttgaataagaaaaagatcgcagcgctctcgattggagacggggttggtaatgagttccagaaaatgctgggcgaatatgattcgatcgcttgctttagtatcggacggcgttctacggctacccaagtccaacaggtttataataaattgcaaaaatacgacgtgatcatttgtggcgtgcatacgattcgcattcccgagagtttagcgttgaggcagttggctgcgaagaaagagttggtctatactttctttaccttaccatatgcttgtaaggaatataagaagtcgatcgagaaggcgaaggcggtcgtgttggcttacgagggcactcccttagcgcaggaatatgcggcccaagtgatattcggtggtattgcggcgaaagggaaacttccggtttcaattccgggattgtattatgcgggtactggtatttttacggaaaagactcgtttggggtatcaccagccagaagaggtgggagcgaatccggaccgtttggatgtaattgagtcgatcgttaaagagggattggatgagaaggcttatcccggatgccaagtgttggttgcgaaggacggcatgattatctataataaatcgtttggttattttgattacgaaagtaggcagccggtcacggaggcgtcagtttatgacttggcttcggcatcgaaggcggcggggactttattggcagtcatgaaagcgtatgatgagaagaaattcaccttgaacaataagatctccgattttataccggagttgaaagagtctaataaaaaggatttatcgataaaagagttactatatcatcaatcgggagtgactccaactattaatttctatctggatgctattgataaggatagttataaaggcagtttatatagttcggcgaagaacgccacgcacccggttcgttttgacgctaaaacgtatgtccggaatgattttaaatatcttccggatatagtatcagatacacggaaacccggatttacgactgaggtagcccgtaatttctatgtgagtgattcctttaaagatacgatccttcaagatatcaagaaatcccgtttgggtacgagaggtaggtacgtatatagttgcgtgaatttcattatgctgaaaatgatggtggaaaatctgatgaaatctccgatggaccagcttcttcgggatgatttctacagcgggttaggggcttggcataccacttataatccgttgaagcgaatggataccttgcaaattgtacctacggaacaagatggatttgtccgccgccaattgcttcgcggatatgtacatgatgaggcagccgcttttcaagggggtgtttctggaaacgccggattattttcgaatgcgaatgatttggcgaaggtgctccaattgatgctaaaccaagggacttatggcggcgagcgctatctttctttggaaaccagccgtttgtttacacaaagcaagagcccgacttgccgtagagggttaggctttgataagccggtgattggtaatccgaaagcctcgccttgtggggctttggctcccgcctcggtctatggacatacaggatttacgggtacttgtttttgggtagatccggataaccagcttatttatatatttttgagtaaccgggtgaatcctagccgggcaaataataaactgggatcgcttgatatacgtactcgcatacaggatgcgatctataaggcgattgataggaaaagccaaaaagattcgtaattttgtgacagttttaacagataggtattaattaaaaagcaggtatatgttatacggacacggtgatgatttttataacgcaaagaacgaggtaaagataaactttagctcgaatgtgtggcacggagctaatttagataaactgaaggaacatttgatcgagcattttgataagctgactcgttatccggagccggacgccgctactttgaaaagattgttggcccgccggtatgagatcaaggaagagaatattgtagtgacgaatggctcgatcacggctttttatttgttagcgcaagcttggcgaggtgcgaaatccatgatcgctattccttctttctctgaatatgaggacgcttgccgtttgcatgagcatgagatctctttcttcccgacatcggacgatttatcagagttatccttggagggacaggatttctgttggatttgtaatccgaataatccggatggaaagctgatccaccgtacggagcttctccgtttgatctcggcgaatccgcagactaccttcattattgatcaggcatacgtggcttttacgacggaagacatgctaaagccgagtgacgtgaaaacgcataagaacttaatccttgtccagtctatctcgaaggcttataatatccccggcttgcgtatcggttatctggtcgcttctccggagatcgcggagaaagtgaacaagtatatcataccttggtcggtaaatgctatcgctatcgaggcaagtaaatatatcttgatccatccggcgcaatttacgttgccgatccgtaaatggcagcgtgagactgcggattttatttatcaattaagtaaattggatggcttggaggtaattccgacctctacgactttcttccttgtccgtttgaagaagggcacggccgctgatttaaagcaattccttttagataattacggaatcttgatccgtgacgcttcgaatttccggggcttggatgagacttatctacggctctctacccagaagtctgatgagaaccagatcttacttgaaggggtgaaggtttggttggagcaacaatgaattgaacacgagaaacttccggaggtatgtgggtatttccggaagtttttgttaaaatagccaaccaatgaacaggggtaagtagtctttcaactctgtctttaatatttcaattgccttatttttatatctttctactgtccgtatggatatttgcatatcctctgcgatctcgccgtaactcttattctcaaagcgattcttctcaaatacatatcgatagttttcgggtaatttagcaagtgcctctcgaagtagggtttgtaattcttcccaagtataaagttcctcgccactatccgcatagatagggatttgctcttgaggaagtttgtctacatattcttcatgattgcgttgcagatagttgagacagtggtttttggtagctgtgatgagataattgcgtgcggaagttcttattacgatgcgtttacgattttcccaaatggaggaaaaaacttcctgtacgatatcttctctcgtttcccgatcagggataaaacgtttggtatatatgcaaagagcaggataatatagctcaaataaacgttggaaggagagcttattgtcctcggtcgtgatttgccgtaaaaggaaatcggtatcagtctttgttggatttctttccataatgggacaaatgtatatatttttagaatatattcccctttgtttcacaagctaaaatccttgctttttgtgcaattggtgaggagggcccacacatatatacgtgttgggcaatacctgcttaggtgatttccttgctttattgtggggtacaagaggaagaaaaatataaaaaaagtcgttttgctgtcgtgtttttgttttgactgtgtctatatagaaaaagacaatcatatatgcgagaaagcggagacgaaaaaagtacattacggcagattgagaagattaaagctctgtctgaggatatgctagaataccaagcgatagatgtgcataaggcttggcaaagcatggaacgtcgtgctaagcggaaagcctctatgaggatgttttcgttgttttttacccgtgccgcagctattcttgtagtaccgttgctcatatcctcgttatttttttcttatttatattataccacaggtaggaatgttaagacgggggcatctgtggtttttgcggagattagttccatgcctggtacaattacccgtttggtgttacctgatcaatctgttgtttggttgaatgccggcagccgcttggtttatccatcggtctttgatgagaaagaacgtaaagttcagctctttggtgagggctattttgaagttgaagccgatccggaacatccttttagtgtgtctacctctgagggattgcgggtaatagcgtatggaacgaagttcaatgtgaatgcctatgacgatgaaccttttatcgaggctgtgctggaaaaaggaaagatcgatgttatccggaacgatgaacggatccgcttggaaccgaacaaacaggtcgtgcttaataaggaaagcggtgtgttccgtgtttctgctgtcaatttggatgagaagatggattggagaaaggggcggatggtatttcgaaatactcctttagagaaggtactaaagcgactggaaaaacgatataatgtggagatcgtactgcataagaactcgaatgcggagtataaataccgtgcgactttcacaaatgagaccttggagcaaatattggattatctaaaacagactgcccctattgaatggtctgcccgacaactttcctctcattcggattccacgtttgtccggcagaggatagatgtttatcaacgataaaaaatcatttcaaaataaattttgtgtaatcactaaatctacatgcttatgagtgcatttcatttacgtaagaggaatcttactcggtatttacctcaatcgaatcgtatcttaaatcttggtacggcatttacattcttgactgccttccagttatatgcaggtacctcttattcacagacaacaacactttccttgtcgttgaaaaacgctacgttggagcaagcgatcgatcggatagaggaggaaacgggttattcattcttgtatgcggatcatgttttggatgtgagtcgtattgtcaatttagaggccaataataaggatattaatttggttttatcccgggttttcgataatatgaatgtcgattataagattgtagataagcagattatcttatctcgtaaattagagtctattcctttggcacagcaacaaggacgcatggtacaaggagtcgtgttggattcgaaccaagaaccagtaatcggcgctaatgtattggtgaagggaacgactgtcggtacgattacagatattgaggggcgtttcacgttggaagttccgaataatgctgtattggttgtttcttatattggttatttatctacagagctggtacccggttcaaagacggatttgaccatttcgttgaaagaggactcacaaaacttggacgagattgtggtcgtaggttatggtgtattgcgtaaaaaagatcttacgggtgcggtttcggtcttgaagatcgatgacttgaaagatacaccggtttctagcgtagatcaaatgatgtagggtaagctctccggagtgaacgtgatgccggataatatgccgggtggaggagttgcggtgcgtattcgcggtttcagtacgatccgtaacaatgatccgctttatatcattgatggtattcctgtggatggtggtattaattttttgaatccaaacgatatcgagtctatgcaggtattgaaagatgcttcctcagcctctatctatggagcacgtgcggctaatggtgtcgttattatcaatacaaaaagagggaaagagggtgagtttaatgtcaatttagatgcttactttggtgtacaaaaagcagcgaagcaattgaggatgttgaatgcgcaacagtttggtgatatgttgtggcaggctatgaaaaatgatggaaaaactccttcgcatgatgtctacggaaatggtgatcaggtagttgttcctgaatatttggatagtaatcatttaattccttccgatgatgtggattgggtcgatgagattttacgtgcggccgtggtacagtcttataacctctcttttacgaaagcagataaaaaatctaatcaattattctcgttaggatactatgatcagcagggactggttaagtttagtgatttcaagcgtgtgagcggtcgttttaattccgagtataaattgtttgatgatcatctccgtataggagaaaatatctctctttctcattcttggggaacaagtgtctctaacaatgccgccttgggaggaactttgtatgaggcttataaattccagtctatcacgcctgtgaagaatctggaagatgagtatgccggaaatgtattctcggatataccgaatcccatgggtaaattgtataggaacaaggataatcaggataagaagagtcgtttggtaggtaatttgtatgccgagttacatttgtttgatgggcttatgtttaagacctcttttggtgttgattacaataatctgtatagacgttctttcagtccaaaatatgatgagttgaatgcctcggagaaattaagtagtttatccaaccgaaatgcttggaattttaactgggtattcacgaataccttgacttataataagacatttggcgaccatacgatcaatgccttattaggtatggagtctttgagaaatagatatgagtattttacagcttcaagagacggttttccgtcagacgatcctaacttccgttttttagatgcgggagatgtaggaacccagaagaactcgggtgctgctacggagtatagtatggtctcttatttcggtaagctcgattataattatcatgatcggtatttggtggcgtttactttgcgtcgggatggttcatctcgtttaggtaataacaaatggggtaatttccctgcggcatcagttggatggcgcattagtaatgagccgttttttgatgttgaggcaattagtaatttgaaagtacgcgttggttggggacagaatggaaactcggatgttccgtcgtatacgacgattgactcatataagagtaattctacgaactcgaattacccgattgatggaaatcaaagtggtgtagatctaggattggtgcagactcgaaacggaaacgttaatttgaaatgggagacaaccacacaaacgaatgtcggtgtggatttgggttttttgaatggtgacttgaatttgactttggactattttaataaagataccaaggacttattgtggcgtagagccttacctgcctcgatcgggggaacaaatatgactgtttgggataatgtaggtaagatgaacaacaaaggttttgagatggagataaattatcaaaagcaaatcaatcaggattttggtttctctgtcgcatataacttctctgttatcaagaataaaatgaccgaactgaatggggtggattatataggtctttccagtagtgaacttcacggacgtaatttcgatcaagagacttctcgttcagcggtaggacaaccgatcggatccttcttcgtgtatgaggctgatggtctgttccaaagcgatgcggagatccaaaactataagaatgatagaggtgagttattacaaccgaatgcgaaaccgggtgatattcgcttcaaggatttgaatggagatggcgttatcaatagtgatgaccgcgatttcaagggaaatccgttgcctgattgtagcatggggttgacgttgggtttcaattataaaaactttgatgttagtgccttcttccaaggtgtatttggtaatgaggtctataatttgacgaattatttgggtgagttttataaccaggctcaatataataaaaattctacgatcttggatgcttggcgtccggataatacggatacggatatacctcgtgtcacattggatgatccgaataataatattcgtccttctacctattatatccataatgcctcttttgtccgtttaaagaacttaaaggtggggtatacactaccggataaagtagcatctaagttgaagttgaaacgtacgtatatttatttgcaaggacagaacttgtttaccataacgggatatgaaggtattgatccggaggttggtttgcagagttattcttctgagaaccgtaatttggatatgggggtggatcgtggagtgtatccattaccaagaacatttactttaggggttaacgttagtttttaacataaaaagagatatatacaatgaaaaagatattttattttgcggcatcagcgttgatgatgtgttcttgtgcggactcattcctttctgaggagcctgtgggtgagttcttgcccggacaggtagagagtgaggaaaatatagagggtatcgtgaccggtgcatatgctgtgttggatgggtattatgcctctgatgcgattaattccggttgctcaaactggcagttcggggatgttgtctctgacgatgcgtataaaggtggcggcggtaccggtgaccagaaccaaatccatttgatggagatctttaatgcgaatcccacagggattgactttgaagctcgatgggctgctctttatgagggaataaaacgttgtaaccaagcgattcgtttattgaatggtagtgaggttaaaaacaaggaacagcgtttagctgagatgcgctttttgagggggcattattatttcaacttaaaaatcatttataatcagattccttggatcgatgaaacgttggtggatccaaatgaatacaataagaaatcgaatatcgagttttcatccgatcaattgtgggagaagattttagaagagttctctgctgcttataaagtattgccggagagccaagcggattatggccggcctactaaaatggcagctagagcttatatggcaaaggtttatttatatcagtccaagtggaaagaatgtttggaagcttgtgatgaggtgattcaatctggaaaatatgagctattccctgatttccggaatgtgttcttgcctgaaaatgataattgctcggagattatctttgcgatccagctgtccattaatgatggttctcccaataatgagaacggaagttatggcgatcgcttgttgcctccgggaggtccttatcctgtatatggctttttgcggccgactcaaaatttggtaaatgcttataaaacggatgttaaaggcttgccttataatgatggtaaagatgtgtcagagaatgactatgtagatgttcgtttggatcatacattagctagaccaaatataccgtttatggatgtacaattgtatgattggactcctagagaggctagtgtgtatggcccgtatagcccgaagaagcgtttggtttcattgaattctacttattattcgccgatatggccttatgtgaatgctttgaatttctatgtgattcgttatgcggatttgttattgtggagagctgaggctgctattgagacaggtgatttagagactgggcgtaagtatatcaatatgattagggagcgtgcgaaaaatactcagcatgtcaagacaatggatcaatcacaagatgctgctaattataaggtaggggtttatgatgagccttttaaatcaaaaaatgaagccgtgcaagcgttacgtatggagagacgtttggagatggcgcatgagggaattcgtttctttgatttggtgcgttggggtgtcgcggatgaagttatcaacgcttatatcgccaaagagaaagtgttccgttcccacttgcaaaatgctcatttcgtaaaaggtaagcatgagtatttcccgatacctcagtctatgattgatatttgtggtacggaagtaatgaaacagaatccgggttattgataaattaaatgaaagaaaaggcggtgtgtcaaatagtttaatatccatttgatgcaccgctttttcacgatgtaataaaaaatatgaagcagctaggagttattttatatctattgtgtttgactacctgttatgagttatgggcaacccctcataatgtcgcttatcaagctaaagtttcctgttcgtctgccttgagccaagagcaggaaggtaagtatgtgatagatcaggtgattcgtatttccggaaagggagaatgggtagccaagacaaaattggatgcgcgtggtcgggtgtatccgtatccttggatacaattagattgggatcatgcgatttatacgaataaggttattttatacgatcgggtggatgagcgaagccattgtgctgcgggtaccttgttctttagtgacggtagttcggtaacggttaatttgattcccaatgatggagcgccaagggtggttgaatttgatactcggaagacggaatggattcgttttcaaatgacggatggagaaggacaagatttagggctgtctgagatagaggtgtatcctgctcctgagtcttatccggattatatctcttgggtgaatccttatgtcgagaccgctaaaggtcgatattttttctttgtgaccggaagtttgcctttcggtatgataagttccgctccattaacccgcaatatcaatcaaggaggaggaggttataattataattctactaaggttttaggcttccctcaaattcataattggatgatttcaggattgtctttgatgccggtgaaagatgaggtagatgtttgcagaggagataaggtttggcgttcttctttttctcatgatgatgagattgtccaacctggttatcaccgtttgttcttggatacttataaaatatgggtagaacagacggttacggatagggtaggactttatcgttttacgtatacgcaagatggtttggcgaaggtcttggtaaatctgggaggtcatatagctacttctactttgttgaacgctcatgtgacaaaggtgaatgatacagagatctccggatattttgatacggctggtcgtgtatggggaggtgtcgatgtggctaaagtttattttgttgttcaatttgataaacctatggatgctttgaatggttgggttggagatagaaaggaaacggatatcaatagtttgataggttctccagaattaattaccgtgcctaagtcttcttttaaacaatctccttcttctggcgtagaagcttgttttggatcttttaaggctggtgatgagctattgttgaagaccgctatctcttatgtgagtgaggaaaatgcccgtgagaatatagagcgggaatgtcaacattgggattttgatcaagttaagagtgcgtccgagcgtatttggaatgagtggttgggaaaaattgatgtgcaaggtggttcttttcagcaaaagaccaagttttataccgatttgtggcacgtattgttggggcgtcataagatagatgatagcaatggcgagtatccggattatttgtccggaggagaacgtattggaaaacaaacaaggatacatacgattgctcctaaattccaagtacggactttgcctaaagataaaacaggaaaatcaaggtttcatatgtataattcagatgctctatggttgacacagtggaatttaaacacgttgtggggactggcgtatccttctgttttagacgagttttccgcttcttttatcgaatatgacaagaatggaggtctattacctcgtgggccgtccatagggtcttatacttatattatgacgggctgtccggctacctccttgattacttccgcttatcagcggggggtgtttcataaatggtcgcccaaggagggatatgcggctatgaaaaggaatcatgagaaaggtggtatgcttgcctttgatatggataaagagttggagttctatattaaacatggatattgcccagaagaggctggcttgactattcaatgggcctttgaggattgggctttgggagaaatggcgaaagctatgggaaaactcaaggattataattattatagaaatcgttccttgggctggcctgcgtcttggcatccggatttgaggttgatgatgcctagaaaagaaacaggagagtgggtccatttggatcctttgtccgagcgtgggtttgtacaagccaatgcttggcaggctacttttggattatctcatgacattgaaacattggctcgtttgatgggaggtaatgacagcttagctactcaattgaattatgtgtttgagatgtcgaaaaatgcaagattcctgtctagttatgttagttatgccaatcaacccggttgctcgaatgcgcacgttttctcacatgtaggaaagccttggctgactcaatattgggtgcgtcaggtcgctaaacagacctatggtgatattacgccagagcgaggctacggcgaaaatgatgaagatcaaggacagatggctggaataagtgcactgatggctatgggattattcagtttggatggaggctctgcctataatccgatgtatgatattacaagccctgttttcaatgagattacgattcgattggattctcggtattataaagggaacgagtttaagattaaagtacatgataactccccagagaattgttatatccagaaagcttctttgaacggagagatgtatcataaatatcaattgccgcataccgtatttgagcaaggtggccttttggaattatggcttggcgataaaccaaacaaggaatggggaactcaataacgatttgggcatatctctcaatttgcatgatgattcaaaaaaaggatgtgcgtaacaatgaggcacatcctttttcatttccttttaaatctaagtagcgtgtattattctactcgtttgttgattacgatatgaccaaaatagccaaggagaaccaatcccagacctgtaagtagaatactatttgtcataccaccggtgaaaaacggtacagccaaaactgccgcaccaataatgagtacgatcactcctagatttttaattaactcattcatggttatagatattttataattattttcttttctaccgcaaataaagcaataataacccgatcgtgaaaatattttcggagaaaaataatgaaacgattgaaattagcttctatatttgtgttataatatagttacgtatgggaagaatactttacatagtttatttgtggctgttttttgtacctgtatttctggtactgactatacttacggctgtgacggttatcatcggttgtctattggggggagagaaaatcttcgcttattatccgggtatgatctggtctcgattgacttgctatctggcgctttgtccggtgacggtaaaagggcgtgagcatatagaccggaaacaatcgtatgttttcgtagcaaatcatcaaggtgcgtttgatattttcttgatatatggtttcttaggcgttcccattaagtgggtgatgaaggcgggtatcgctaaaattccatttgtcggggccgcttgccgtgccgccggttttatctttgtcgataattctacgccgaaggctgccgctcgtagtgttttggaggcggagcgttgtcttcggaacggggcttccgtggttgttttcccggaaggttcgcgtacgtataccgggaaaatgatccgtttcaagaaaggggcttatcaaatggcgctagatcagcatttgcctattattccgatcaccttaaacgggccgtttgatgtcttgccgatcgggtcgttgaatgtccatcgtcatcggatggagatggtgatccatccggcggtttctaccgagaatatagacacttcccacaaaggaatgcaagcgttcgctgatcagactcaagaaatcatagcatctgccttgtgggaagaatataaataatttaggttattatttccagcttttcaagatgccacgtttcgctactttcaggctgaatccgaagttatcgccgaacatggaaccggcatcagctgccaaagaccctgtaaattcccatcccgataaacggggatgttgataagagatatctaaaagtccggaagctcctcttttcttgctaaggaaaggggtggcatgtctaccccaactattcatcacggtgactaatacccgataagatacttgtgaggagatagcgccttccgcaccgaaatgccagtcacgaacacggttgttcttgaatcctaatgaaccgttctcgttatactccggacttgggatcagaggagaacctatcgcccggttaaaataagaggctccggtagtgtattctccgttgttataataatcatcaccaccgccacctacgccgggatgtaggtcgtgatcaaaatcgatgaagtggaactgtccgctttggtctcttgtaaccagatactccacgaccaccttacgcaaccacgggaattttggtaaatccaattgtcctccccataatccgtcggtattgtttacgaatatcataccggatttatcctcgaagaaatgttggtaataggcggatacttgccagttaggttgtgtaaaagccaatttgaaatcgtaagagccataatgattacccagtacgttgatttgatcggagactgttgcgtcgccacccccttcgctgccgcaaataacccggataaggtccttgatggattgaggctgctttccgatcttaggattggttgaggttcctccccattgtgcccaatgctgtactccgattacaccggataacgggaagtcattgcgtgtatccttaatctgtacaaataatgatttatgatgccataaaacgttatctacataagtctgcttattgtttgtgaagttagccagataatccttgtcgaaagaacgaccgacggcaaagtctcctttgacttgcatccagcctttcgttaaaggaacgacggtaaattccggaatactgatgtttacttccggtatcgggcgggcattggcggattgcacgatatcgcccgagctaagccaacgatcccaaagtgaattatagcgttccttgcttcctacactcaatagcaagcatttgtaacctaactcggcatatatttgttggataaagaaattgcgatgacgaggaactgcggccactacgtctaatccggctccccagcgaaaacctttgccaaaagtttgattatggaatactcccgcattcaaatatccgttattcgcttccaaaggaacaattccgtatcgattgctaaccatccagaaaggggtattgtcgccactagctaccgatccgaatatttcggccttgtaggtagtcgcttccggagttgtctcttcttcttgagcgaaactagccgttgccatccccagacaagtcagacctataaaaattgatcgcactgatttcatgtatatataaatgttttgtctgggcgcaaaggtaaggatttatatgtttggtgcaaccattattgtttctttaaccactcgaatatagtttgataggcatcgttccgatagggcttttgagataggatcagatcgtggatgccgtttggaatggtatctctcgtgactttgtctcctagtttctccccgtatttttgaatgtcttgaacatccaagacgatgtcggaggtcatgtattcctcatgccatgtctctgtttccggaaaagatttgttggaagacatcactagtatcggacaatccagttttaaccctttttgtaccgtctgttgcgcttcttgtatggctttgatccatccggcttttttcggatgcccgaatatcattttccagttcgtatcaaattcccattctcctttatactgcttaagcaggctataagcgtaattcggatcacccaaaccttgtacggtaagattcggaaatagcctcccgacaaacgcaacggttggcagtacgactttctccattaaccatccgaaattccaatctagaaaagggctgttcaagataagcccgtctatcggtaactcccctttcttgctattcaaataataaggtgtgatcaacccgcccgtagaatgcgccattaataatatccgttcattaccttcggactggatggtggctaaagcggtatcgatatcagcgaaatactcttttaggctcttgcaaaagaacgggttttgattgggtaatatcgaacgtccgtatttccgcaagtccatcgcatagaaattatatccgtgagcgtttacgctatcccctaattgtttctggaaaaaatagtcattatagccatggatatacagcacggcctgttttacgctatccagttgaggtttcttgaccagcgtgcaaactaccttcccctcataatcatccggcatctggaaggtacggcgtaaatagccatctcccaatacatcgggtacgtattgggcatatacctcgcataaaatgaaacagaggaatataataagatttatttttcgagacataaatatattgtttctattttataactgtatttgcaaagatagggtttatcaatcaatggtaattaaccaagatcataaaataaaaaatgacagataagcatgaaaaacgataggataaacgtgaatattacaacttatacgtaaaaagcactatttatggtaagccgttaattttttatcttaacaataaatattttactttgttggaaaatggaagcgtgtatggaaccggaaataacagtaataatcatagatgatgaccttggatcgatccagaaattgcaaaacgatctattggccttctcggaggtaaggatattggatacagcgacaacggcggaattgggcaagaggcatatccttaagtatctaccggatttggtgtttttggatgtggaacttccggacatgtctggctttgatttgctggatgatatacgggatgatattcttccgaacttgagagtcgttttctatacggtatacgataaatatatattggatgccctacgtgcctccgcgtttgattatttgttaaaaccgtatttgattgaggagttagaggcacttatcgaacgttttcatacgacagagcctgcggatgttgcctgcatggagagatccttgcggaaaatattgaatcgggatagtcgatttgcgatccaaaccgtttcgggtcttttgctagtccgttgtgaggagatattcctgtttcagttcttgggagatcagcgttgctggcagattgtcttgacttcccgtactactcataaactaaaaatgggcacgacagcgaaagatttgttgtctatcaataatacgtttgttcaaataagccaagattgcattgtgaacttgacttatttgatgttcatcgagaataagaccttacgatgcgagttctatccccccttccaagaggaggagaggatcgcctcgcatcgctattttaaacaactgagagaacggctggatattatttgatggttactcttcttttctccctaattttatctgttttgcagggtgtaataggcttctgaagtgaataactaacggcttgggaagtgaataactaatcacttgagaagccttttgcaagcgattaagtatgttgtctaaataattcattttcaccgcataaggaatttacatttcaagtcgtaaattatttacttcagtaacggatagtgcctactaagatttgcttattttctgacatttacatacaagagagtcaatatattctagccatccaatccgcgaaaaagtagtcatataccctataaaagccatcttcctgtgttatcaaatcatttttcaacagaggtttgaccgcagattgtacagaactggctgagggtagcttgtattttttgataaatgctgatgacgtgagaccttctgctctgccctctttggcgatagcttgtaaaacaagtttttgtttgggagcaagattggcaagtagatccttgtaactactttcttgtgttagaatcacattcttgcgggctatttctatcttatccataccacaacgctcaccttcttcggtcaatgcgaaaagttcgttcattatcatttgcacaaaccaagtatagccatcgaacatccgataaacttcttctattacggatttgtcaataagctttcccctttgctcaaaaagccggttggcgaactccacatagatatgaatgggtattggctcaagtcctatactaatagcgctttgataaaaaggcttggaagaggaattaaacatattactcatcaaatggcgtttactgccggagaagataaacatagtctgcttgcattgttgaatcttggttcgcaacaacgcttctacatttttctcctcatagccgccaatttgttggaactcatcgatcgccacgatacatggtttatctgcggtctctagataagcgaagatctcatcaagtgttgtttgtggtgcttgaatgtctcctagcccaatatcaaaacaaggttctccggttaccatatccagtttaaaacccgcacgcaatgaggttatgatttgaaagaaccgttccgtccaaaccgttttctttggcttcaattcgtcatagatggcttttcctaatagatatacgaactctgttaatgaagtagtggcataaatatccacaaagaacgcatgataatttttttctatcgattcttgatgaaaaagatgttggatcaatccggtcttacccaaacggcgtggagaaatcaatgcgacattacgtccgttctcaatctgtttaatcaagaagcttgtctctccctcacggtcacaaaaatatttgtctgatacatatctacccacgacaaaaggattcatcattgcgattgtctccataatataaatacattttattgcaaatataataattatatccataataaagaaaggaaacggtatgtttcacttgcacgtgtgggagtccgtattaaataatttgatatagagtgatttaattcgattatttatatatcttcgcattgtagaaaccgccgtttcggaaacagcggtttcggaactgtgtattattgccatgcgtaaagattaatctttagtatcgaaagaatggaaaaacaatcatttatcgctctagtaaagcgttattatccttggatctgcagtatggagaaggctgcttttcgtatacatgatgatgtgaatcagaaatatgatcatgtgttgccttatggatttcatctgaaaatgacggtatcgtatgtctctcgctacggatatctggtagctgagaccgaggcggatatactgattttgtatgcctctgcttttctgcatgatacgatagaagatgcacggatgacctataatgatgtcgtgaaattcctgaaagagttcaaggggggaggctttgtcttgccagaaggcgtgagacagcacttggaagaccaagttccggaaatcgtatacgccttaacgaatgaaaaaggacgaaaccggggagaacgggcgaatgacctgtattatcaaggaatacggcagactaaattcgcttcttttataaaaatgtgtgatcggctggcgaatatccaatatacgatgatgtttgtttttgcgaaccggatgttggatgtttaccgtaaagagtatccggaatttatccgatcgatcagtgaaggtgcggttacacaggtgccggatgccatgaaggaggaagcggaacgtctgttaaatagcgaatcgtatattatatagtctcctcgaatgtctttttttcagaaatccatacggagcgatgaagatctgctcacctcattgaggcaggggagcgaggatgcgtttactgttatttatgagcggtatcataaattattgtatgtgttggcctataaatatttgaaaagtacatattcttcggaagatgccgtacagcaagtttttctgaaattgtgggaggcacgttccctactgatggtgaacgtgaatttaaggaactatctctatacaatgctaaagaatcacgtattaaatgagatccggaataataatagcgccgtagagaaaaattatgagatcgtacaatcagcgccggaatatgaggatgaactgcttataaagatagaggaacaagatatgatgtctcatttttaccaagcgatcgatcatttgccggagcagaaacgccaagtctgtctgtataagctgaaagggaatctatctaatcaagaaatcgccgataagatgaatatctcggtccccacggtaaaaacacattatgcgcaagcgataaaaatactgcgggcacatttcgagagactatttttatttcttttatatttgtggaactcatcctattgatggctttgcgtgtcaattgataaaagaaaatgaatatgaaaatacccgatctatcgatcatagagaaaacgctaaataatgaggctacttccgaggagtcttgtgaggttgttcgttggtttaagaccccggaaggacaggcatggcttgctgagcgtatcgatcaggatgagaaaacgattcatatgggggaggaagaggcatggatcgaccatccgataccctcagccgtaatgtatcagaatattatgcggcaactccgccgacaaaaaatacgccgttttatagcgtatgcggctgcggtctttataccgatcgctttaattataggacttttcatacgcataaactcacaagtggatttgttggcggatgatggctatgacgaggtgtacgtacctaatggggaacgcatgcaagtgctttttcaagatgggagtaaggtccatttgaattcgggaagccgtattcgttatccgaaaaaattcggtctctccgaacgtaaggtttatttggaaggagaggcttggttcgaggtcgccaagaacaagaatcggccttttatcgtggatctttcttatatggatataaaagtgttgggtactacctttgatgtgaaagcctatccggaggaagaagctatattcgtcgctttagagacaggatctatcgagttgaaatcaagatccttcaaatcttatcaattacgcccgggagaaaaagcggtttataacaaggcttccggacgttgtgaggtactccgttcccacgatgtcaagatgtattcggcatggagacgtaatgtgctcgtatttaagagcgcccctttatcggacgtaatgaaaacattggctcgaacttatgatatatcctttgacgtgaaggattctgccgctttgcgatatacgtatacgataacgaccgatagcgtcaatttgaccacggtattaaaagaattggaaaaaatcacgcctgtactattcgaggaaaaagggggcaagatagaagtccggatgaaaaaataaaaaaattagctataacgactcatccttttagatttgtcgtgtgtctatttgataggagagcaggaaacagagtgttaaccttaaaatagatatgcgtatggattcctcataaatagataacataagaacagccgaaaagctcctacccttttcggctgccggtcgtattaaaaataaatttctaataccaactattaaaatcaatacaaatatatgaaagaaaagcaagaaagccctcggcgtaggtgccttttaatattaattgagaaaataccgaatgccatgaagttaacctttctatttttagtcatatccttgctgagtttcacggctaccgcctcggctcagcgggtttctattgtgctggacaatgcgaaagtggagaaagttttagctaccatcacccaccaaaccgggttgagtgttgcgtatagcaaacaaatcgtagatttgaatcggagagtgagcgttaattttacgaatgcagaattgacaaatgtattggataaaataacggagggcacgtcattaagttatgaagttaaaaatggaaagatctacttatttgaaaaacctctagcgaatgcggtcacccagcaagccaaaaaaataacgggtgttgttgtcgattcaaaaggggaacctatcattggagcgaatgttgtggagaaaggtactacaaatggtacgataacagactttgatggtaaatttattttggaggtatcggataatgcgacacttcaattttcttatatcggctttatgccaacaactgtcgctattgcgggacagacttcattgaatgtacgtttaagggaggatacacaggctttggaagaggttgtggttgttggttatggaacccagaagaaggtgaatttgacgggttctgtttcttcagtcaaatttgatgaggaattgacgaaccgtccgatcacagatgcttctcaagcactttccggaaaggtttccggcgtgtggatcagccagaattcgggtaagccgggagatgatggagcgcaattgagaattcgtggctggggtacattgaataattcggacccgttggtgattattgacggagtagaaggggtattcagccaagtaaatccgagtgacatcgaaagtatcacagtcttgaaggatgcggctagtgcggctatttacggatcaaaggccgctaacggtgtcgttttggttacgacgaagatgggaaagaataatgagaaaacccaagtagagttgaactcttacgtcggaatgcagcagatcggacgtcattttgatttagtgacgaatagcgccgagcatatgactatggcgaatcaagctttggtgaatgggggagagaaccctcttttctcggaaacattgatctctaatttcgctaatggaacagatccttataaatacccgaatacggattggtatgactctctttatcggaatgctttaataacagggcataatttatccattcgcggtggatcggagaaactatcttccttcttgtctttgaactatttgagtcaggaaggtattttgatgaactctaaggcggagcggttcggtatccgggcaaatgtggagtataaagtgaattcatggttgagagttggcgctcgtttgaattatactcgtaggaattcccaagagccttttgatttgttccgtgtattcgaacagcaacaaggcgcggctcctttcatcgctccatatacccgggatggccgtttcggttcggtagaagcgattaaggatgatggtactttattgtatacgacttatcagccggttatagacgcttcgaacggggcgactaaaacatccaaggattatatggctgtaaatgctttcgctaccgtagattttacgaaagacttgaacttacaagtaacatgggcctctaatggcaattggaaaatggtcgataaatataatgagaccctttatggatatacggattctggcatagagacgataccgaaaaattacaatcgtgatggtattgtgttgagtagagagcaagtatcgaccatgcgtaataatttccaagcgacattaaactatagcaagcgatttgcggataagcattatgttgccgctatccttggtacccaattggagaattacagtataaagaacgtatttgcccgaagaaccaacccacccaaagaaggattaacccaagtggacgcgggaacggaaggtatcaagggagagggaaattttgaaggtctacgcatggcatcttattttggtcgattgaattatgcctttgcggataaatatttatttgagatgaatctccgtgccgatgcctcctctcgttttaaacggggaaatcgctggggtgtttttccgggtttctctgcaggatggcgtttgagtgaagaggcgtttattaagaacctgaatctgttttctaatttgaaactacgtgcgtcgtggggacaattaggcaatcaaaccattgaaggatattggccttatttaacagtgatctcccaaaattatgacttgagttataattatggaggctcattggctccgggtgctgccgtaaccgctttggtggatgaggatattacttgggaaactacctcttccttggatattggcgtggatttgggcttcttaggtaataagttgaatattgaagctgattacttcaataaaaagacaaccgatattatcgttcaattgccaataccaaacgtattaggggataagaccgcgccgtttgagaatgtgggcgagatgaaaaataatggttttgagttagtcgtgaattatgataatcttgagacgagcagagatcgccttggatttaacgtaggactaaactttacgtatatcgataataaagtaacgaaatttcaaggaggaaactctccggaccagctttatttgattcgtgagggatatccgtataaggctttgtatggctataaagcggttggcatctatcaatcggacgaagaagccgctcaacatatgcatagcaatgggcttaagccggaaatgggaaatctgaaatacgaggatgttaataacgatggaaaattagactatcaagataaacaagtacttggtaatacgattcctaaaattacgtatggacttactgccggcttacgctataaagggtttgacttaaatatcttattccaaggtttgggacaggcgaatgcgtttacgaagagcggcatgacccgtatgcaatacgaatggctgactatttctgataaatggcgggatgcgtggagcccagagaatccggactcaaatataccgatgcttcggtttgactcttcatgggacacgtatgactcctcattttgggtacatcgtatcgatttcttgaaattgaagaacttacaattaggttatgcgttccctgaatggattacctcaaagctaaaaatgcaacggttgtatgtatatgcgaatgcccagaacctgtttacgattatgtggaaaaaagggtatgaaggatatgatccggaaagaaatacgtttgattcgggtaccaattattacccgactccgagaatatttacatttggtataaatcttaatttctaaaagtatgaaacagttattagcatattgcttatcaattatactatgtgtctctttcacgggatgtatggagaattatttggatttgtatcctgaggataagattacttcggcgagtttcccggaaaatgaatcggatatcaaactccttttaaatggtgtctatgctcaattgagggaaaaagaggtttataatcaaggcttgtttggctttggcataacggatggagctacccctaacgcatttaactggggaacggatgaggtttttaataagctgggtgccgggcgattgagctctagtgacggaggagtcgtaacgtatcgttggaaaagatgttacgagataatctcccgggcaaactatttgttggcctgtatggatttagtggatttatcggaagaagcgaaagccaaatattcaggtgagactcattttctacggggactggcttattccgtgctagcggaaacctatggtggggtacctattatattgacgaacatttccacggaagaagctcgtagcttgaagcgggcgagtttggaggagacttggcaacaggcgttggatgattatgaggttgcgatcaccaatttgggagtggatgctcccgagccggggcgtgctaccaagggggcggctttaggtatgaaaatgcgagcctacttataccaaggtaaatacaaggaggttctggcttgtgtcgagcaaattgatgcgttgaagaaatatggtctattccatagttatgagggcttgtttgatccggctaatgagaacaataaggaagtattgtttgatatccaatatattgaaggcgagaattcgcaaggttcctatattgaccagtattgcggaacgggtaccggaagttggacccgtggaagccgttatgtccctacggatgatttggtagcggcttatgagacgatcgacggctctcctgtagatcccgagaatccttatgagaaccgggatcctcgtttaggtttcacggctgtacttccgggttcttatttcttgggctatcgtttccctaattacctgtatccgggaggtgcgtttaatcatgccggtaatcggttgaaacatttaagtacccgtaaatatcggattcaggatgagtcaaagcttcctccttccgggcagtcttatatcaatgatatcatactgagatatgcggatgtcttattgtcaaaagcggaggcgattattgagacgaatggaaatgtggcggatgcgatcgctatccttaaccggatccgtacggaaagggatgatgttaagatctctttgttgccgacatctatgagccgtgaggaggcccgtgagaaagtgagacatgagagacggattgagttagcattagaaggacgttattggtcagatgtaaaacgttggaaaatcggtaaggaactttaccctatgattattaaggatcatgagggtagcgtgatcgagacgaagttcccaaatggctatttggaatattacgatttattaccgattcctgatagcgagcgctctttgaatccgaatttggatcagaacccgggttggtaatgttcaactaaaagaaggatgaaatgaaatttatatctaaactaatatctgtattagctttttccggagcggccgtggctactcaagcggcggaaaggccaaatgtgataatcgtatttatcgatgatttcggatatggggatttaggttgttacgggagtacgaagcatcgtactccccatatcgaccagatggctaaagagggaatacgactgaccgatttttatgtgggttcgagcgtgagcacaccttccagatcggctttattgacagggtgttatccaaggcgagtctccatgcatgtaaatgcggaccctacacctttgatgtccaaagggaggcaagtgctatttccagcttcgcataaaggcttgaatcccggtgagataacgatcgccgagttgatgaaggagcaggggtatgcgacggcttgtatcgggaaatggcatctaggggatcaattgccatttcttcctacccggcagggtttcgactattattatggtattccttatagtaacgatatggatcgtccgtattgtccgttacccttgatggaacaggaggaggtaatagtggctccagtcggtcatgattccttgacgattcgttataccaataagactgtggagtttataaagtctcataaggaatctccgttctttatttacttgtgccataatatgactcataatccgttagcggcttctcccgctttcaagggaaagtctcagaacggactctatggagatgcgaccgaggaattggattggtcgatgggagtcttgcttgagactttaaaggaggaaggattggatcaaaataccttggttatctttacttccgataatggtgcggatgaacacttcggcggtacgaaccgtccgttgagaggccaaaagggtacgacgtatgaaggtgggttcagggtgccttgtataatgagatggcccgctaaaataccggcgggacaggagactgataatctggtgacttcgatggatttcttaccgacattggcgcattattgcggttatgcggttccttccgaccgggtgatagatgggcataatgtgtctggaatcttggagggagaatcgatggcatcgcccacggagactttctattattaccagaaacaacaattacaagcggtacgttggggaaactggaagtatcatttacctttgaaggaacgtatcaaaggccctcacttcccggatacggaagtcggtgaagctcgtttatataatttggcgaatgatttgtcggaaacaaccaatgtcatcgataaacatcccgaagtagtaacgaagatgaatcaatggatcgaacaggttcgtagtgatatgggagattggggatgtgaaggccggaaccagcgtcctgccggtatcatagatgaaccttttccccgtttacttaaataaaaagatacgtatatgaaaacactgaaatcattgtctgttttaacagcggcggtattatcgaacagcttgagcttgaacgctgcctcggatgcggccaataagcctaattttgtaatcatattctgtgacgatatgggatatggggatttgagttgctatgggaatcccacgatccgcacaccgaatatagaccgtatggcttgtgaaggaatgaagctgacccagttttatgtgggggccggagtttctacgccaagtcgggccgcgttaatgaccggacgtttgccggttcgaaatggattatatggagatcgggtagccgtacttttccctaactcaaaggctgggttaggacaagatgaggtcacgatcgccaaggttttacaacaaagtgggtatgcgaccggctgtgtaggcaaatggcatttaggagcgttctctccctatttaccgacggatcatggttttgatacctatttcggcataccttattccaatgatatgagccccgttcagaataaaggcgcgcatgcccggaattttccaccgactccattgatagtggatggtaagcaaatcgaatcggaaccggatcagggagaattaacccgtcgctatacggagaaagcggtatcgttcatcaagaatcattcaaaggagcctttcttcctttatttcgctcataccttcccgcatatcccattgtacacgaatgcccgtttcgagggaacgagcaaacgaggcctgtacggagatgtggttgaggaaatagactggagcgttggtgaagtgttgaaggctctgcgtgaaaatggcttggacgagaatacgtttgttatttttaccagcgataacggcccttggctgacggagcatgagaatggcggttccgcaggtccgttgaaggatggcaagggtacttggtgggaaggtggcttccgggttccggccatttgttggatgccgggaaaaatcaatccggcgatcaacgatgagattatgacctcgatggatttatatccgactttcctctcgatggcgggtatcgagcaaccgaaagatcttgtattggatggcgtgaatcaaaccggattattgtttgaggaaaagcattccgcccgtgatgaggtttattattggtggggaagtgagttgatggcgatccgtaaaggggagtggaagtattattttaagacgatcaaggaccaatatctgcgaacctgtaagatcgagactccggcagaacccttgttgtataacgtggagacagatatctcagagcgattcaatctggcggataagcatccggagatcgtgaaattactgatcgaggccggtgagaaacataagaaaggaatgaagatcaagccttccgtatgtgatatgatgtaatgggacatttaaaaacactagattagatgaataaatatatactaacagcggcttgcggattggctttttccgcagcttccgcacaaacaaaggctttgccggatagcccgaatatcctgctgattttggtggatgatttgggatatggcgatttgtcctgtcaaggagccgccaaggacattcaaactccacatatcgataaattattaaatgaaggagttcgtttcacgaatttccatgcgaactgtccggtctcctctcctagtagagcctcgttattaaccggtcgttatccggatatggtaggtgtaccgggagttattcgtacgcataaagaggatagctgggggtatctgtcggaggatgccgtattattaccccagatgttgaagaaaagaggctatcataatgcgatggttggaaaatggaatctaggattggagtctccgaatacccctacggaaaggggtttcgatttctaccggggatttttaggggatatgatggatgattattatacccatcgtcgttttggaaataattatatgcgtgagaacttgaaagagatcgatccacaaggacatgctacagagattttctctgattgggcgatccgttacctgtcggatatgaagcaaaagcaagagcctttcttcttgtatctagcttataatgccccacataccccgatacaacctcctcaggaatggctggaaaaggtgaaaaagcgtgaaccgtcacttccggagaagcgtgctaagattgtcgccttgattgagcatttggattacaacgtcggacgtgtgtatgaggcattgaagaaaaatggccagttggagaatacgatcattatatttacctctgataatggaggacaggacgatgcgggtgcgaataacggcccgttcagaggtgcgaagcaggatatgtacgagggagggatccgggtagccggaggtatttattggaagaaccagatccgtccggcggtacgtgataatttcgtcatgctttcggatatgttcccgaccttatgcgatctgacagccgtgcctgtatcgcatgagatcgacggtatcagtatcttgcctcttttacggggtgaggaacaagataccggagatcgaatggtgcattgggtgcgaagggaaggtaattcccgatatggtggtaaagcctattacgcatctcgctataaagattataagatcttacaaaacacaccttgggaacctatccaattcttcaatctgaaagaagaccctaaagagcaaaacccgatcgcagagcgttcttccgctgcctataaaaacttgttcaatggcttgatggagcatatccgccagacgggtatgatcccttggcaaagtaagcgatataagtaaccttttcgtattatttcaatgaacacgtgtataatgtattttgcgttatacacgtgtttttctataaaatctcttctagctaatctgaaaatcgaatgtttttgtgtatgtttgcgtcaaatctgcgggagttatttctacatgatctatatgaaaatatccgatgaggggctttgggaactgtgtctgaagggagatatgagagctttccgtgagctgtattgccgattttacgccttattgcgcaattatggtatcaagttacttcctgacaagagcttggtggaagattgcgtacaggatatttttatcaaattgattcaaaaccacgagactttatctccaactgtaaatgtcaaaggttacttactcaagactttaaggcataagttgtatgatatgatcgagaaaaacaggaagatggaggacatctctctttatgaggatactttccaaacagatgaattattttctcgtatctcactggatacgacggaagcggacgaacgggttaaactcttaatgaaggctttgacaaaactttccccccaccagagagagattatttatctttattatgtaaatggattgggacacgatgagattgcggagatcttaggtataaattatcaatcgagtaaaaatttattatccagaacgcttagtaagttaagaaggtggttttccctggacgctttaataatggggggcatccattatgttttattccctatgcttacataagcgattggtttttaaaatatctaccatatctacaactatgtcttatatgccctataaataagtatattacatggtggttgtagatataaaaacatctacaattatcactcttgacctaccatgttttaaggagaatggcaagaaagcaatttatcacttaggcttgtgagtagggaatggagtctttaagagttgtttcccttagggaaaacaaaagtttcgtactgaagaaacttttgttttactataggtaaactaaggtttagtgtacggaaaacttttgtttgatactaagaaaaactgtaaatgtcatattattagttatttatgtatattggagggataccgggtgtcgatatatagcgagtgtggaagatcgtgcttttcaaaacacaagaatatgaaaaattgtgtttttttccgcaaaagtgagtaccaaaatcaaattgatccgtaataagaataaaaatgtaacctgtgaataagaaacgagacatatttgaaaaagatttattccggcaagctggagaggatttatggcgtaaagtccgagaagtggaacaattggattccaagttcgctttatcctcatggcagaaggtcgaggaacgtttgaaagctccccgtaaaacctttgttttacgcatacgctatctagcttcttctgtggcggcggcggtcgtgttactccttgccataggatgttatttctggatggtgggggatgataaatcctccttgccattggctttgttggaagaaaagagcatagactctttgccggacgatgagattgtgctggtggaaaatggaagctgggtacagcttaaaaatggggctacaattacgcatgataatataggtaaaccaagtgtaaaagactctcagataaagaagaaagtattagctactaagactggaaatttgaatcaaatcatagtaccgaagggcaagcgggcaaatattatattttcagatggtacccagatatatgtaaatgccgatacccgtgtgatttatccggccgtgtttgctaaagataaacgagagatcttagttacgggagaagcctatttggatgttaccccagattcttcccgcccttttatcgtaaagacaaatgcgtttaatgtaaaggtactcggtacccaatttaatgtttgcgtctatggagatgagccgaaggcttccgttgtattagtcgaaggccgggtggaggtagagaatgataagcatgttaaagaggtgctagctcctaaccagatgatagagttgggaaataaaggggtatctattaaggaagtggatgtgtttgagtatatctgttggaaagataatctgatgcaagtgaacgatcgtaaggttggggatgtcttaaataaattagcccgatactatgggcgtacgattgtgtttgataaagagatcgcggaaatacctctttccggtaaacttgatttgcgaggaagtttggaagatgttgttgagattatttgtcaatctctattcttgcgacaagagacggataaagagaataatataatcatattaaaatagattgcctatgtaagagaactatttggtggaaagactttgtgttaaaaagaaaaattgacaaaaagaaccggaagataccgtcatatccaccggttcaaagacttcgtttaatcaattaattatgtattaaagaaaaaacattacaaatgtatgaaaaaaaaagatgatttctgtagagaatcgaatcattttctcaaaagtgtttgtttagccttatgcttgatcagttctggaggctctgcggtgtacgccgctaccttgcagacggaacaaaccacgttgacagtccgtatggataattgtaccataaaggatgtatttgaccacattgagaaaaatagtgagtttgtttttgtttatcatggcgctaatatcgacttgcatcgcagggtaaatttggacgtacgggataagtccgttgaggttatattggaaaggttatttaaaggaacggatgttgaatatattatcaacaaccgacaaattatcgtacgaaggaacgagaaaaaagaaaactcgtccctttctattcagcaagctaaaaaaatcacggtcactggtattgtgaaagatactcatggggaacctctcattggtgtaaatgtactggtgaaggggagtagaacgggtacgattacggatatggacggacattttttattaaatgaggtaagtccgaatgcgatggtctctatttcttatatagggtataagacagaagaaatagccttgaataatcgttctagcctaacgattacactgacagaggatagtgaacaactggatgaggttgtcgttgttggctatggtactcagaagaaagtgaatttgacaggatctgtttcttccgtgaagtttgatgaggaattggcaaaccggcctataacggatgcctcacaagccctttctggtaaagtgtcgggtgtatggatcagtcaaaattcgggaaagccgggggatgatggcgctcagttaagaatccggggttggggtacgctgaataactcggatccgttggtaattattgatggagtagaaggcgtttttagtcagatcaatccaagcgatattgagagtatcaccgtgttgaaggatgcggctagcgcagctatctatggatcgaaagcagcgaatggagtcgttttggtaacgacgaagatgggtaaaaataatgagaagacacatgtggaattgaactcatatgtaggtgtacaacagttggggcggagatttgatctggtgacaaatagtgcggagttaatggccatggcaaaccaagccttggctaatggtggcgagagtcctttatatcccgagtccttgatctctgatttcaagaatggcacggatccttataaatacccgaatacggattggtacgaacacgtttatcggaatgctctaattacaggccataatttatcaattcgaggtggttcggaaaaattatcttcttttttgtccttaaattatttgaagcaagagggtattattacgaatacagatgcggagagattcggtatgcgggctaatctggaatataaggttaattcgtggttgaaagttggcgctcgtttaaattatatacgccggaattctcaagaaccgtttgatttatcgcgtgtattctttatacaatcgggagcagccccttttatcgctccttatacgagagatggacgttttggttcggttgaggcgattgcgcaggatggaactttattgtatgataacaggaacccgttaattgatgcttccaatggcgctaccaagacgactttggattatatgtcgttaaatgcgttcgctactgttgactttacgaaggacttgaatttgcaagtcacttgggcctctaatggcaattggaaaatggtcgataaatataatgagaccctttatggatacacggattccggtatagagacaatgaccataaattataaccgggatggcttggagatgagtagagagcaaatatctactatgcgtaataactttcatgcgaccttgaactatagcaagaagtttgtggaaaaacattcggtcgcgggaatcttgggtgctcaattagaaaattataatattaagaacgtatatgcacgtaggacggatcccgctaaagacggattaacccaagtggatgcgggaacgaatggcattcagggcaagggtaatatgcaaggattacgtatggcttcttacttcggtcgtctaaattatgctttcgctgataaatatttattcgagatgaatcttcgtgcggatgcctcctcccgtttcaaacgaggtaatcgatggggtgtttttcccggtttctcagctggttggcggttgagtgaggaaagcttcattaagaatgtgaatattttttctaacatgaaattgcgagcttcttggggacaattgggtaaccagacgatcgaggggtattggccttatttaactgttatcaatcagaattataatttaagttataattatggaggttccttggctccgggtgcggctgtaacagccttggttgatgaggatattacttgggaaacaacttcttctctagatattggtctggatctgggcttcttaaataataaattaagcattgaagcggactatttcaataaaaagactaccgatattattgttcaattaccaatctccaatatcttaggtgataagacagcgcctttcgagaatgttggggagatgaaaaataacggttttgaattggttgcgaattatgataatttggaagccagtagggatcgattgggatttaatgtaggattgaattttacttacataaataatgaagtaacaaagttccaaggtggtaattctccggatcaactgtatttgatccgtgagggatatccttacaaagcgttgtatggttataaagcgattggcatttaccaatcggatgaagaagcggtagagcatatgcataataatggctataagcctgccatgggtaatttgaagtatgaggatgtaaataatgatggaaaattggactatcaagataagcaagtattaggaaatacgattccgaagatcacttatggtatttctgcagggctgcgttataagggatttgatctgagcctcttgtttcagggtttaggaaaggcgaatgtctttactcaaaatgaaatgactcgcttaggatatgagtatatgcgaatcgcgggcttttggagagacgcatggacaccagagaattcaggttctagtatccctatgcttcgatatgactctacttgggatcgatacgactcctcattttgggtacatcggattgacttcttgaaattgaagaacttacaattgggttatgcatttccggaaaggattacttcaaagttgaaaatgcaacggctttatgtatacgctaatgctcagaatttatttacggttatgtggaaaaaaggctatgagggatacgatccggaaagaaatacgtttgatgcgggaggttctccgtatccgacaccgagaatattcacatttggtttaaatcttaatttctaaagctatgaaacgtttaataatatattgtttgtcgtttttgttattgatctcttttggtggttgtatggagaattatctggatttgtatccggaggataaaatcacggccgctaactttccggaaaaagaatcggatattaagttactgttagatggaacgtatgcttgtctaagggagaccgctgtcatagatcaaggtttgtttgggtttggaatgacagattgtgcgactcccaatgcatataattggggaactgtcgaggttttcaataaattgggagccggacgtttgagctctagtgatggcggtgtcgttacttttcgttggaaaagatgttatgaaatgatctctagggctaattatttattggcttgtttagaaaaaatagaattagcgggggaggcgaaaaagttgtatgttggcgaggctcatttcttgaggggattggcttattcggtacttgcggaaacttatgggggtgttcctgtcgtactttcagaaatctcaacatcggaggctcgtaacctaaagcgttccagtcgagaagatacatggcaacaggcgttggatgattatgatgtcgccatcgctaatttaggtgcggatgctccggagaaaggacgtgctacgaaaggcgctgccttgggaatgaaaatgcgtgcgtatttatatcaaggtaagtataaggcggttttggaatgtgtagatcagattgatgctctgaagaaatatggcttgtttcatagttatgcgacattgttcgatccggctaatgaaggaaataaggaggttctatttgatatccaatatatagagggtgaaaattcacagggtacttttctggatcaatactgcggaacgggaaccggtagttggacacgtggtagtcgctatgttcctacagatgatttggtggcggcttatgagaccgtggatgggagccctattgatccggaaaatccttatgagaaccgtgatcctcgtttagcgttcacggttgtgcttccgggctcttatattttaggacatcgtttccctagttatttgtatccggggggagcttttaatcatgcgggtaatcgattgaaacatttgagtactcgtaagtaccggattcagaacgaggcggatttacctcccgccggccagtcttatatcaacgatattatcttgcgatatgcggatgtgctattgtcgaaagcggaagcgattattgaatctggtggaaatgtttcggaggcgatcgctatattaaaccggatccgtacggaacgagatgacgtgaaaatttccccattgcctttgtccttatctcgggatgaggcccgtgagaaactaaggcatgaaagaagaatagaattggcgttggaaggtcgttattggtcggatgtgaagcgttggaaaataggaaaggagctttatccgatgattataaaggatcatgaaggaagcgtgattgagacaaaattcccgaacggctatttggaatactatgatttattacctattcctgatagtgagcgctctttgaatccaaatttagagcaaaatccgggttggtgatttagagaatatatttattagaatttagattatataaaatgaattataaagagatctttgttgcggttaatagtgccgcattgatgttgtcaaccgtaagttgtggcgcaaaagaggaagctgttcctaagccgaatatcataattttattagcggatgatttgggatataatgatgtctcttgttatcgaaatgagaattttccgcagcagtcggatagctttcctacttcccaaactccgaatttggacttattggcccggcaaggtattcgctttacgaatttttattgtggtgcggctgttagctctccatctcgtgcggctctaatgaccggtcggaattgtactcgtacaggggtttataattatctggagcaaaactcaccgatgcatttgagagatagtgaggttactatagcagaagtactgaaacaagcagattatgcgacggggcattttggaaagtggcatttaagttcgggacgtccggatcaaccttatcccaatgatcaaggttttgattatagtttttatgccttgaataattcagtcccgtctcatcataatcccacgaactttttccggaatggagaaccgcaaggtgagatcgaaggttattcctgtgatattgtggtaacggaagcactccaatggctagacaagaataaacaggaacctttcttcttaaatgtttggttcaatgagcctcattttccaatggaggccccggaggagttgaagaaaaggcatgctattaatcctgagtattatgggtgtatcgaaaatatggatatagcgattggtaaattaatgaattatctaaaagaacagaatctggaagataatacgattgtcatatttgcttctgataatggttctcagtgggattattctaatttgccatttcggggagagaaacattttaattatgagggaggattgcgagttccatgtattgttagatggcataaacatgtaccaaccggtgtgattagtgagtttaacggttgtttcacggatatattaccaacgttagcgtctttagcggatgctccggttcctacagatcgtgttattgatggtatggatatttctccggtgtttttggggaaagctgaaacgttggaaagagaaaaccctttgttctttttccggtatattcatgatcctatttgtatgatacgtgaaggcgactggtgtctactgggatacgatgagcctctaccatgggcttttagtttggatgaattagcgcttggtaaagtgaagccttggtatttgacaaaagaacatatggagttcgccaagaaggtgtttccaaaatattttgagttatataatttgagagatgatcgtgaggaacgaatagatgtggcagataaacatcctgaaattgtagcgagactgaaatcaaagatgttgaaacttaagcaggaagttgtagctgaaggtggagattggtttgcggaagacgtggatgaaagatgacaaagttgcttgcgtgtcaaatgatatgagaaaataagtcctaataacttgtttaaaattcatagttatgattttcttgagacatagttatgttttgagtatttcataactatgtttttccgggtcatttcaaaggaaaaaagtgctctttttttgttatttctataaagatatttacctttgtctctatgttaaggataataacacatattgaacgcttattgctgacgcatgattgtgtgatcttgccgaagtttggtggtttcgtgctgcaaatcttgccggcgacgtatgaggaagaggaacattcattccggccgatgcgtaaagaggttatgttcaatgtaacgctacagcatacagacggcttgctttccgagtcgtatatgcagacgtatggcgttgattaccggaaagctcaattgatgctggaagaggatatcgaggctttgaatgtttctttggaacaagacaagcggataacattggggcgaatcgggactttctctataggagaggaagggcagaccatttttacgccgggcgattctggggtatttaatgcggattcgtatggtttatcatcgtttcattttccggttttgcgatcgttggaggaagagcgggaagaggttgccttacttacgggtaagaaaaagaaagatgtgttctatatcccggttagtcgtaagttgatccgggttgttgcggcgtcagctgctgctgtcgcattattctttgtggtttcgactccggtgaaagaagtaaacctgtccgcttatacagctagttttgttcctacggagatgataaattataggtttgaggaaccgatttctcagctggaggaaattcaagtatcccaagaggacgagatggtagcggaggtaactcccaaaatagaagcgactaaggagacagagattgccaaagcggcttctgctcctgaggtaaagaaagagcttgttgctcccgctccgaaagtgaaatccgtggcaccaaagaagatgtatcatatcgtgatagcgagtttcccgacagaggagcaggcgaatgagtatatatccggtgtagaccgtgcgcaatgtaaaaatgtaagcaaggtggttcgtgatggtaaatatcgtatttatgcggataagtttaataaccgggcggatgccgagagctacatggcgacacttcgaaaaatagaaaagtataaagatgcttggctgttcattagccgttaataaaaaagcctgatctttcgatcaggctttttttatgacttgtcgtcgttttgtggccggggcagtcttttcttcttcaaccgtcctgcctttcgtaaggcttggtccagaatgtactggatttggccattggtgctgcgaaattcgtccgcagcccaagcttcgatagcttccatcatatcagcgtccacccgcaggatgaagcttttgacagtattatcttttttggccatatactagtattaatattaaattcttacattaatgatgtagagtcccggtatttacgacaggttgcgctgcctcgtcagcacaaaggacaaccaacagattactgaccattgcggcctttcgttcctcatccagttccacaatattgtctttatccagtttgttcaaggcgagttgaaccatgctaaccgctccttccacgatccgttctctggcggcgataattgcttccgcttgctggcggcgtaacatgactccggcgatctcggaagcatacgctaagtaattgatacgggcttccaatacctcaatacctgctatcgccagacggctgtttaattcctcctccagcttttgagcgacctccccgtcatcggaccgtaaggtcacgggatctttgctctcgttataatcataggcatacatgccagcgatcttacggatggcggcatcactttgtatctgcacgaaattctcataattctgcattcgttgggataattcagaggattctcccattgatatgaatgatttattcgaagagatactaatggacgaagaatcgatgtcgaacatcgctctataagtatccttgactttccataccatcacggccccgatcataaccggattaccgaccttatcgttaaccttgataggagggacatctaagttacgggcacgtaacgtgattttctttttgctgtaaagtggattgacccagaaaaatccgttatcagtaattgtccctttatattttccgaaaaagagcattactcgggcattgttgggctcgatttccatgaatcccaataaacaaaccactaacaggcagagtccgacgatgccggtgattacgctccaagtcccgttggtgcctgcgattaaatagcagcagagacccgatagagccaataggagaaaaagagcaataaaccccgagattctcagtccgttgaatgtcttttcggttgctttcatgatgatttgtttttgatattaatttgatatcacaaaataagtgatttttatggagactgccaaatattttgagggatattattagagtgatctgtaaatattttcatagctttgtctcatctaaaaattatatacttggactttcagttagacacgaacaataaggagtttcaggatgccttgcaactgatcacccacactcgccagtctgttttcctgacagggaaagcagggaccggcaagtctacttttttgaagtatatttgcaatcatacgaagaaaaagtatgtggtgctggctcctaccggaatagcggccataaatgcgggcggcgttaccttgcattcctttttcaagctcccttttcggccgatgttgccggatgatccggatttaagtttgtctcatggtcgtatctttgagttttttaagtatccgaaggagaaacggaaaattatcgcggaggtcgatttgatcatcattgacgagatatcgatggtgagggcggatattattgattgtgtagatcgtatcttgagggtctattccggtaatatgcgattgccttttggcggaaagcagctattgttcgtgggagatgtcttccagttggaaccggttgttccgtcggatcaaaaagagatattgagtttgttctatgcgagccctttctttttctcggctcgtgtgttcaaggacattaatttagtgccgatcgagttgcaaaaagtgtatcgccagaccgattctgtttttatcaatatattggatcggattcgtaataatgccgctagaaaacaggagttggatacgttgaacggtcgttattttccgtctttcgagcctcagaatgaggatatgtatatcacgttggccactcgccgggatcaggttgattttatcaatgagaagaagttggccgagcttcccggagaagagtacgtctccgtgggaaagatcgagggggattttccagaatcctcactacctacccagctgaatttatccatcaaggaacaggcgcaggttatttttatcgataatgattatgagcgtcgttgggtgaacgggacgatcggtatggtatcgggtatcgatgagaatggaaatgtttatgtcttgctggagagcggtgtagaacatttggtcgaacctacctcatggcgaaattataaatacaaatataacgagaaagagaaacggatcgaggaagagattgtcggtacgttcgaacaattgccgattcgtttggcttgggcgatcacggtgcataagagtcaaggcttgacttttagccgggtggtagttgatttgaccggaggggtatttgccgggggacaaacctatgtggcgttgagtcgttgtacttcattggaaggattggtgctaaaaagcaagatctcttcccgggatatctttatccggaaagagatcgtagaattcagccaaatattcaataaccaagcattaatagagaaaagtatcaaagagagcgaggcggaattgcaatatggtcgggcggctcagggttttcggcagggtaatatgaaagaggcggtcgaggcttttgccgccgccgtatctaaacggaatgaattggataatccgatggtacaacggctgcttcgtttgaaattgcaagccttgaatagtcaaaaggcacagattaaggctctgagggaagaattgcattcgcttcgtgagacccagaaagagtatgcacatgaatattacttgatgggtaacgagtgcataacgaaggcccatgacgcgaatgccgctattcgttgttttgataaagccttgaatttgaatccgaattatgtggaagcttgggtacgcaaaggggttactttattggatataggtgaggactacgacgctcaggtttgtttaaacaaagcggtaaaattaagtccgaaatcttttaaggcccgctataaccgtggaaaatgcctattgaagctcaaatattacgatgaagctattctggatttccagcaggcggtaagtatcaaacctaaacatgcggcttcccacgaatatctggcggagggtttccgggcgatcggagaggacgaattagcccagcggcatcaagatatagcggatgccttgcgagggggagaggatatatgatgaaatagaaaaggcgagaaaatttatttcccgccttttttatggagttatatctcttgattaattaaagatgtaacggataccaacctgcattttccagcattcagtatagatacggttataagaataagtctcagtcggatattcaccattgatcttatacatggagaaaattggagtcttgttatcatccatgccttcatatttcaagatacggcaaccgttggaagaagatgcgttcttcattacaccccatttcgagttgatcatattaccgatattcatgaaatcaaggctcaattggaaatgatgttcggttttacctgccttgaatgagaaatcttccgtgatacgaaggtcgaaacgatgtacccaaggtgcacgtgcggcataagcctcagcgtattctcccttgtgattctttaaataagaatcttggtctacgaagttccagaaagcggttctatctgcttcattcttgaatttgatttcactatcatctttcgggatatacatcatatcattattgataccgtcaccattcatatcatttgtataagcgaagctatatccggaagcggaataaccggaatagaacagatttaagcttgtttttctgagcagacctttatggcggaagggcagattataattgaccgctgcgattaccttgtcgggcactacataccgtgaacgttgtacggtcgcgaaattcggtccgtctatcgttaacattccctgccatgtagatacagggtcgctacccggaagaccggaaatttctttggattccgtgtgcgtataagccaacatcatgttcaaatcctctacgggttgagcgttaatcgtaacattggcggtataaccatgtcctttggatgtgttagttaatacaaccgcattcttaccggatacatacgtataatcagatggataaatcaaacggttatccgctccgttaaaatgttcccaatttgacgggtccttgatgttgatattctcaagggttacggcattgatgttcttgttatagatgaactcgccggttacggataatgggaaggaagtagggagctgataatctacagccaaggaggttttccatatttgtggcatcttgaagttgtcctttacgccagagatcttagaaccggcaaccggattctctatcgtggtaggaaggccgaatttcttgatcgcatcatctacattcgtaatcatgccgccagccaattgatccagacgggaatcatgacttaccgcaattccattctcatattttgtgccgaatactacggcattttgtaccatattcgagtttgtcggcatattcgtaaagaataccaagggtaaacgtccggtaaatatacctgtaccaccacgtacttttaaggaattatccttgaacacatccgaaacgaaacctacacgaggggatatttgcattctagacttaggccatttgccggtgtcgatatgtttgcctccgaaatcaagatcgtagattgcgtcgtttctttgaagatcgctattgtcgaaaattaaatcatcgaaacgtataccataagttaacttcacgttcgggcgaatgttccactcatcctgtgcgtagaatccgatctggttaaaagtaacctgagctttcgggtcggaaacaccgttgtaaccgtatgtccatgcgaacgtttcaggagcggcaccgttcaagaaatcatctaagctgctgtaacgataatatcccgtgccgttgcgcatataagcattgctagcaagttggtgctcgaaactgataccagctgtgatcttatggtcgccggcaaagtaagtgaagttatcgataacacttgtgatcttgttcttcacgccgttgttgtaagtaaataattcatatccggcactcatataaggctccataatttggttaccttccgcatctttacctgccaagatatcaatgaaggggaaaggggaagagttggttccgcgcatatcctcgatatccgtataagtgaaaagtaactgattggaaatcttatcagagaagcgactgttcaaatcagcggatacggaagacactttattgtcttgggaatacatgctgttagcaaaagacatggattggtaacctacacggcttgtattatacagacgagagccggaaccaccatccatagagttagcgttaggagcgttccatgcggtattctttgtatagttgtaccgtacgctcaatttatggccattcgtgatattccagtcgatacgacctagcaatttcaaattcttttcgtctgcggggaagttcgtggctgatcctgtatcataaccatatttatctcttaagaaatcggataccttttgcatgtcggagagtgtagtgcgagatatgtagttattctcgtccggttgctctccttcggtacgagctctccatttgatcacttgttgcggttgtttttccacctctacattggcgaagaagaataatttattcttgatgatcggaccgccgaacgtagctccgtaaatcgttttggattccttagcacgtgcgcccaagtcttctccatcgattgagtttcctcgcatattctggttctggaagtaagtgtaagcggaacctttgaatgtgtttgtaccggatttggtgatagcgttgataccgccaccaatgaagtttgtctggcggacatcgaacggggcgattaccacttgtacttcctcgatagcgtccatagagatcgggttaccgcctccgggaagattatccgaaaggccgaagttgttattaaagttcgctccatctaccgtaaagttcgtggaacggccatcgccaccggcaaaactcatgtcggaggcataaggagaaaggcgtgcgatatcggagatactacggttaatggtgggtaaagaggtgatctgtgacgaggagatattggttgtcgcacccgtcttttccgtattgaacttcgttttcgccgctgtgattacgatctcgtccaaggtctcggaagattctttcaacttaacattcaagttgtagttctctcccaattgcagggtaatgccggaataaacggcagattgataaccaacgtaagagatcgtaactttgtatggacctcctgtacgcataccttgtaaggaaaagcgtccgtcaacgtttgtgatcgtaccataatttgtcccagaaggttcgtgaaccgccaaaacggtcgcaccaataacgggttcatcttgaaacataactgttccactcatactggctgttgttacctgcgcttgtgtcgggatgacaaacaagaaactcagtacagctaaaaggaatagcgtctgtaaatgtctgctcataatttaaaatagttaatgtaataaaaactttcgcaaagttatgggttattttttaatatcattgtatgtttcttatttaatacttgtttcatattcatgaagttgctgtgacggggcggaattgagtaatgtccttattcggagatggatggcttgtattggcaaaacaagagggttctttatgaaatttttaatttgatgattcttaactaacattccctgttgggcggtgatttaaaagaattatagacgcttttcctgcatattgttggattatggatgtgattggttgaaaataataatctggagatctgtgtgaggaatgttaatgctatgaatattatatatagtttgtgacaaaaagagatatctaatccctatctttgcggcgatatacaaaaatgttataattattttaaatataaatacttcttgtatgaggaaaacttatctacttttaacgttacttttgttgtgcgtgggaatatccatacatgctcaggtgacgacggcgagtatgagtggtaaagtcacggatacatcatcggaagcgatgatcggagtgaatatcaaggctacgcatacgccaacgggtaccgaatactacacgattacccagccgaatggttcttattcttttaacaaccttcgtatcggaggcccttatgtggtagagttctcttatattggatacaatacggagagccggacaggaataaacttggttttgggtgaggatctgaaactgaatgtagtaatgcgggaagatacccaagctctcgacgaggtagtcgtggttgcggataagaaccccattatttcaggaagtcgtacaggtgcgcaggaaatcatcactcgtgagaagatggataagctgcctacgattaaccgttctttggatgatttcgtgaaattaaccccgatgagtagcggtaagaattttggcggtgtctcttaccgttttaataatgtaacggtggacggtgcctcctttaataactcgtttggtctggcttctgctcttggagcttccggtacggaaccgatttctttggaggcgctcgagcaggtacaggtgatgatcgctccttttgatgttcgaaatggaggattcacgggtgcgggtattaactccgtaacgaaatccggttcgaatgagtttcatgcttctgtatatatgtacacgaagagtccgtctatgatgggatatcgtgtgaaggatgagacgattggtgtttcagagttctctaatcaccaatacggtatcagtttatccggtccgatcattaagaataagttattcttcttcatcaatggtgagatggatcgtcaggaggaaccgatttcttatacgaccgctaattctgcggcggatgcgacagtcttgcagggtttatctgatttcttaggtgatgagcttgggtataatccgggtaaattcgacgtgaataagacaaatactcaagcggatcgaatcacggctcgtttagactggaatatcaactcaaataatgtgttgagcttaaaatattattatttgaaatcgtttaatacgaataacccttctacttccggtgcgccgaataacggacgtggaccgaatgcgttcgctattccgttctcttcttctttctaccggacgaataataacttcaatatttggatggctgacttgaatacgaccattaatgaccgtatgtctaattatttgaagatcggttattcccgtttgcgtgattatcgcgatatggatggtggttacttcccgcaagtggatatcttggatggtgataacaatgcttatacgactttcggaaccgaggcaaactcctataataaccagttgaacagtgatatctggcagatacaggataacttcttgatgaattttggcaaacatcagattacggttggaacgcaaagtgactatcgcgcctttaagaatggtttcgctcaaaactatccgggttcttgggtatttaactctgtcgatgattttaagttcaacgtattggctacaaaacaatacatggccgctcataacggaagtgtacaaggatttgatatccgtgagtttaatccgaaagattttggatttggttccaatgtgacaggtattacgaattcttcttctacggggtaccagtactatgcgcaaagatattcgatgacggatgattttccattcgccgagataaatgtattccagttaggtttgtatgcccaagataagtggacggtaagtgataaattgaacttgacgttaggtttacgtattgatgttccgttctttatgactgatttgcagtcgaatgataaagtcgccgccgagacctatcgggatggcatcaagatcgatgtttctaaatatccgaacgccaaacctcagttctctcctcgattcggttttaactacaaaccgtttgacgatgagaatggaagtttgcagatccgtggtggtacgggactcttcacgggtactcctccttatgtatggatcagtaatcaagccggcaacaatggcgttttgtttggtgacttgaatgtccgggcggtaaaggacaagaatgacaatatcattagcgatggcagaccttcgctaggttttaccggaaatatggatacttataaaccggctgaaggtagcgctacccgttcggatatagcgattacggatccggactttaaatatccgagcttatggaaaagtaatatcgctgccgattataagtttggtgatggctgggtagctaccatagagttgctgtactcaaaagacattaacgctatttatcatgacaatatcggattgtatcggaccgagcaatttgtaaatgatggtggagcgggtaacgcacgtccatattataatggctattatagcgatagggaaggaaatcaaaaggccgcgaatcatgtcgtgatgctgcgtaataccagcaaaggacattcgctttatacgaccttccagttgcagaaaaactttgttgatggaatcctgaagggattgtatttgaatggatcttactctttcgggcagtctagaggtgtaacagacggaacatcgtctgtggcgacttccgcttggaagtaccgtgcggccttggatggaaatgcggaagaagtaggttatacggcaggttcttttgatggtcgtttgttattgtccgcttcttatacggctaactggagtaaatatgcggcaacaagttttggtttgatctatcagcgttatcgtccgttccgttattcttattgttataatggtgacgcgaatggcgattctcagttctccaatgacttgatgtatatccctgcgaattttgacgaggtaaaagatcatttgttaccgggcgatttcgatagccaagaagatgcatggaaagcgatgaatgcctttatcgagcaagatccttatttgagcaaacatagaggtgagtatgccgaacgtaacggtgctgtcgctccatttgcgaatcaattggatttgagcgtttctcatgatataaagatttaccagaagaatggtcgctcacataccttgcgctttagtttcaatatcgccaacttcttgaatttgttgaatcgtaactggggtgtggtacaaacaaccgttttgggtaatcagcaatatcagttcttgacgatcccgaaaggacaaggcccgagtgcggcgaacaactatacgttgaagtatacgatggcgaaagatttggatgagaccttcaaggataatttgaacgatgtgtctcgttggcagatgcaattcggtatcaagtatatcttctaaaagaaaaatctttcattagataaaatttaataattagaagaggttcactatctttgtggacctcttttttaatttaatgatatgtggaataatcgtattgagttcttactcgttagtttcttttgtatttgttcattggcttttaccggttgccaaacgaaaaaacgatcggatcgttatgtcgtagttttatcaatggacggtttccgctctgattatccctcacgtgctcatactccgacgttggattctttggcgaatgtaggggttcgctccacgtttcgcccatgttatcccagcgtgactttcccgaatcattatagcatggctaccggattgcatccggatcaccatggtttggtaaataatttcttttatgacgcggagcttgatagttcataccggatgggaaacctggatccgcgattttatggtggagaacctatttggaatacggcggaacgccaaggggttcgtaccgcttccttctattgggttggtagcgaggtgcctttggcgagtggccagccttcaatatggaagccgtttgataaatcggtttctttttcagatcgtgctgattccgtgatctcttggctgaagttgccggaagatatacgtcctcatttgattatgtggtatatggaagagccggatgcgataggtcattccgctaccccggattcctcggcaaccttggatgtggtagagaacttggataaagtcttgaatcatttcttcacggaagcccgtaagctggatattttcgataagatcgattttatcgttctctcggatcatggaatggccacctattatcccgagagatatgtgaacttgaatgattatctaccccgggatagtttcgattatgtctttgatggcgttcctacattattatatccgaagaaaacctatgtggatacggcctatgcgattttacagaaagtgccgaatataaccgtatggaagaaaaacgagatccctgagaaattggtttacggaaagaatcctcgagttagtgatctggttgtttctccacatattggaacgtatgtgcaattccgcgagaaatcatctccccgttatgcggcgacacatggttacgataattttacaccggagatggaggctatattctatgcggcaggtccctcgttcaagaaacacgtagaggttccgcaaatggcgaacgtgaacctctatttgatgatcgcacgcttattgaatatacagcccgccccgaatgatggagatagcgctgtcgttcagcggttatttaaatgataggacttcgcgctactttctaaatggggatttactgcacgggccttgcagtactactgtaaagccggttgcagtaattgatgccttattgatgttcgcatgtcatcttacgcatgaaagcgagactgcctttagctagctcatctgcgttgtatttagatggacgccaaagagatacggcttccgccatgccgggaacggaattggagaaattctccagaactaagtttccattgaaatcgatttcctgtagtccccgaaacaaatcatcccagcgtacgtttccttcacccagcattccccggttgctttcagtcatgtgaatatggcgaagtcggctgcctgcggcgataaccggttcatagaaactagtctcttctatattcatatggaaagtatccagatgcaaagataaattcggagcgtctacgcgtttgataaagcgcaagacttcctccgcggaggtacacatatagctttcatagcgattgatcggctctataccgatcgtgattccggatcggccggcgtattcggcaacctccgcccatacctcacaaagcgtattctcttcttcccgtgttcgctgtttgccggagaagaccccgatgccggaatgtaagacccctcccaagtaatcaacctccagttcgctcgctttatccagcgccgccttgatcaggcgagtcgcttccttgggataaaaaggaatatgcgcttcttggggaaggttgagagaacaagtcgccttcaatccgtgttgtttcaattgtcgctttacggttggagcgtcgaactccatggaaggaggcaataagatttccagtaaatcaaaaccggcggcagatgcttgctggatggcgaaaagaccgccttctggtgtccacataggtggtatccaagaaaggatggaagctccgaaagtaggattcataatcgtattgtttttattcgttagggttacaaagtaagtacttttttgaagatttcattgcgaagaaagtgaaatccttcgcaatgaaatatcataaatgtcatttaaaaataaaagttggtacccggacagaagatagggtggctgctggtgttatcaatttcaatcttattttctctagcgagccaaccgatagcggaccatagatccgcatctgttagagcggattttgctctcaacgcctcaaaactccaatgttggccatctgaaagcaaattccagatagctcctgcatttaatccgatcgatccttttgtcatgataaaatctgtttttatgtttatggtatatagtgcttatattgttataacagataatatccggtaaaagtatgttgcgttgagataaataatctaaaaaacaaaaatctcttgatgcgttgaattttattccttgaagtcagcgaatatggattcatcgtatacattgtgttcctttttatcgtggaatggataccatacttgggcgaagaacggatttcctttagcgatctcgtcgtaattccaagggagcggtaaacattccgggcaccaatggcctcctaataatactaatgtgggagaggccttaaaacggtgaccgaattggcattcccaatcgagtggggtcgataagtctccttttgtcatggccggggacaagcattttcctcccctgaattctgcggctttacgcatatcctcgatatcccattccgacttcggcttactttcatcataaccatgatccagaaagacgggtgtttcggaggggcgttttgtccggatcttatcccaacccgggattgcttgccaatcctcatacgagccaaaataggcggatatacgatcttggtgtctgttcttgatccagttacgggttcccagtcccggctttttagcgatggctcccatacccagttttatgaagataggagggacgatctttgctaggtggaaataccaagggacttggctggccatccatttaaaataatcgtcgcaagtttggttactgcggaaatgcagatatccttctaatagatctgaatcggtataccattgtccgtggaaattacgggtagcgaaccagttcggttcgaatattttctccggggcgggacagccgatcgcttttaacaatttactctcaaactcataattcgtcaggcggaaagatgggccgctactaatgttatagaaacggttccaaaactcatccggcacctcttcctcgcatacattcgctagtaagcgaccggaatcctcggcggtagcccattccagcacgccgtctagcggtacgtggaatgtgattgggtccgaacccttgaataataattcggggcataagataccggtttggcgaaggcacgcccaatgtttaatacccgactccacgaaaatacgttcggctattgtctttgagatggcataatgatcatagacacttatattgatcggatctcccgtacgtccccaatgaaccggtgcgttacggtggccggtttgcgccacggagccgatatagactaccttgatctgatctgcgttcggttgcgcttttacggcatccacgatgtgttgagcggcggtcgtgtttactttcaaggtctttttagggaaataatccgccgccggcgaaaccattccacctacgtgtaatacgtagtccgcccccgttactccatttaagacatcttgataactcgtcaagtctccccaaacgatacggatcccttccatagcctcataggtggccaacttctctttattgattttgctcggacgagccaagagtgttatattaaaacgatctagccgtttggacaactcgaccaatccggcatggcccatcgtcccggtggctccggtcagaaagacggtctttttacttttcatgatataatttaagtgtataataaaaatcttaggatactatcgggtagcgaaggtatataaaaaaaagctcccaaccaataggttgagagcttttgtagtggatacgagaatcgaactcgtattacatgcgtgagaggcatgtgtcctaaccgttagacgaatccaccatttagatgtcattgtttttgtttgacgatgcaaaggtagatatattttttaattctgcaatagttggactgagtttttttgaagaaaaagtgtgttttttatcaaaatgccaagaaaacggggagaataccactaaaaggcgttaaaagtagttgcgatttcattgttttttcattgtcggtactgtttatttattctacctttgccatctgtaattgaacaaaatagtattgaacattactaataccagtttaataaacaactaatattatggcagaacttaaagaaaaacttttctcagaattcgcacctgtgtctactgaagagtggatggcgaagataacggccgacctgaaaggggtaccgtttgagaaaaagcttgtttggaagacaggcgaaggatttaatgtaaatcctttctatcgtgcagaagacatcgagggtttaaagactacagagtctcttcccggtgaattcccttatgttcgtggaacgaagaaagacaacgattggaaggtacgccagaacattgaagtttgctgcttcaagggtgctaacgagaaagcactagaccttttgacgaaaggtgttacttctcttgggttcatcatcaaaggtgatgaggtgaacgaggagaacatagctactttattagagggtatttgtccggcttccgtagaattgaacttcaacacttgcaactgcaaagcggagaagttgatcggtatcttggctgactacttcaaaggcaagggtgtcgacgcagagaagtgctacggttctgtaaactatgacgctttcaagaaacctttagtaaaaggtaaagaaaacagtgagtgggtagaaggtgccgcagctgtgctcaaagctggacaggctttgcctaactaccgtgtattggctgtaaatgcgttccttttcaacaatgctggcgcttacatttctcaggaattaggttacgccttggcttggggtaacgaattgatggcaaaactaaccgaggctggtttcaccgctgacgaggttgccaagaagatcaaattcaattttggtatcagctctaactacttcatggaaatcgctaagttccgtgcggctcgttggttgtgggccgagatcgtagccgcttataagccggcctgcgaatgcgcttgcaagatggttgctcacgcacagacttcagagtggaacatgacggtttacgatgctcacgtaaacttgcttcgttctcaaactgaggctatgtctgccgctcttgctggcgtagactctatcacggttcgcccgtttgataagatttaccagactccggacgatttctccgagcgtatcgcacgtaaccaacaattattattgaaggaagagtgccacttggataaggtcgttgacccgtctgctggttcttattatgtagaggtattgacgaattccttggccgatgtcgcttggaagttgttcttggaggttgaggaaaaaggaggattctccgttgccgtgaacgcaggtgagatccaaaatgccgttaacgcttcgaatgtagctcgtaagaaagcggttgctacccgtcgtgagatactgttgggttctaaccagtatcctaacttcacggaagtagctgccgataagattcaggaaaaaggttcttgctgttgtggcggtggtcattgcggcgaggcaacgatcccggctcttgatttctctcgcggcgcttccgaattcgaggctttgcgtatggcgacagagaagagtggcaagactccgaaggtattcatgttgacgatcggtaacttggcgatgcgtttggctcgttcacagttctccgctaacttcttcgcttgtgccggatataagataattgataacttaggcttcgatacggttgaggctggtgttgaggctgcagtcaaggcgggtgctgagatcgtggttctttgctctagtgatgacgagtatgctgaattcgctcctgccgcttacaaggctctggccggacgtgccgaattcgttgtagccggagctcctgcttgcgcagacgacttgaaggctcaaggtatcgaccagtttgtaaatgtaaagagcaatgtgcttgagacattgaaagcattcaacgctaaattaggaatcgcttaagtataaacaattatgagaccaaattttaaaaacatagatataaagaatgccggattcgcagctacaaacgctgccgaatgggcaaaagccaatggtatcgagcccaattggaaaacacccgagcatatcgaggtgaaacctgtatatacaaaagaagacttggagggtatggagcacttgaactatgcttctggtttgcctccttatctacgtggcccgtacagcggtatgtacgctatgcgtccttggacaatccgtcagtacgcgggtttctctaccgctgaggagtctaacgctttctatcgccgtaacttggcttccggtcagaaaggtttgtccgttgcgttcgaccttccgactcaccgtggttacgatgccgacaacgaacgtgtggttggtgatgtaggtaaagcaggtgtatctatctgttccttggagaacatgaaagtgttgttcgatggtattcctttgaacaagatgtctgtttccatgaccatgaatggtggtgtgcttccggtattggcattctatatcaacgcaggtttggagcaaggagctaaattggaggaaatggccggtacgatccagaacgatatcttgaaagagttcatggtacgtaatacctatatttacccgcctgagttctccatgaagattatcgctgatatcttcgagtatacctctcagaagatgccgaagttcaactctatctctatctccggttatcatatgcaggaggctggtgctacggctgatatcgagatggcttatacgttgtgcgacggtatggaatatcttcgtgccggtatcaacgccggtatcgatgtggatgcgttcgctccccgtttgtcattcttctgggctatcggtgtaaatcacttcatggagatcgccaagatgcgtgcggctcgtatgttgtgggcgaagatcgtgaagagcttcggcgctaagaacccgaaatcattggcattgcgtacacatagccagacttccggttggtcattgaccgagcaagatccgttcaataacgtaggacgtacttgtatcgaggctatggccgctacattaggacatacacaatctttgcatacgaacgcattggatgaggcgatcgctttgccgaccgatttctccgctcgtatcgctcgtaatacacagatttacattcaggaagagactaagatctgtaaggaaatcgacccgtgggctggttcttactatgtagagtctttgacgaatgaattggtacataaaggttgggcgttgatccaagagatcgagagcatgggtggtatggcgaaagccatcgagacaggtcttcctaagatgcgtatcgaggaagcggccgctcgtacacaggctcgtatcgactcaggtgttcagaccatcgttggtgttaacaaatatcgtttgccgaaggaagatccgatcgatatccttgagattgataatacagccgtacgtaacgagcagatcgccgctttgaaggagttgcgtgctaaccgtgacgaagccgctgttcaaaaagctttggctgatatcacggagtgcgtgaagacgaagaagggcaatttattagagttggctgttaaggctgccggcttgcgtgcgtcattgggagagatctccgatgcttgcgaggtggttgtaggtcgttataaagcaatcattagaactatttcaggcgtgtattcatcagaaactaagaaagacgcagacttccagaaagcttgcgagctttgcgagcaattcgctaagaaagagggccgtcagcctcgtatcatgatcgctaagatgggtcaggacggacatgaccgtggcgctaaggttgttgctaccggttatgctgactgtgggttcgacgtagatatgggaccgttgttccagactccggccgaggctgcccgtcaagctgtagagaacgatgttcacgtaatgggcgtttcttctttggccgctggtcataagacgttggttccgcaggttatcgaggagttgaagaaattaggtcgtgaggatatcatcgttatcgctggtggtgtaatcccggctcaagactatgacttcttgtataaggctggcgttgccgctatctttggcccgggtacttccgtatcgaaggcagcttgccagatcctagagatcttgttaggcgaataaatagcatttaaaccttacggttttttaataaagagaggctggacaattgattttgtccggccttttttagtattgtatacgggtttatgtacttttgtagcgattattcaattaaaaagggaaagaatcatgggaatcgttataggtatagacgtgggaggtagcacgaccaagatcgtcggtgtggaggataagaagatcaagaacccgatgttcgtgaaagctaccgatccggtaacctctttattcggggccttcggtaaatatatttatgataataacatctcactctcgaatatagagaaagtgatcttgacgggtgtaggtagcgcctatatcgatcaacctttatatggcttaccaaccgcgaagacggatgagttcctcgcaaatgggctaggggcgcagtataatacgggactggatagcctgttggtggtcagcatgggaacgggtacctcttttgtcaaggtacaaggctccacggtcgagcatatcgggggattgggtatcggtggcggaaccatcctcggcttgtctaagctattattgaaaacgcatgactttcaccaaatagcgtctttggctgagcatggttccctgaatgatatcgacttgcatatccgggatattacgccgcatccgctacccggcctgccgctagacgtgacagcctctatttttggaaaagcggatgcgaacgctaaggttgaggatatcgctctcggtatcgttcatatggtcttgcagactatcgggcaaggagctgttttcgcctcgttaaatggcgatatcaagaatatcgtgttgatcggtaacctgactcgcttgccgcaatgcccggatattttcccccgtctggaggagatgtgcgatgtccatttcaagataccggagtatgccgagtatcgcacggctatcggggcggctttatgttatatcaggaaccgggaatatagggatattttttgtggaaagtgttaggctacatcaaaactttatgtatctttgctacatgctttgttccctttcggcaatcgccggatagggattaaaagggaatcgggtgagaatcccggacagtcccgctgctgtaagcttcataaacgggttgagcaatactgttgccactgttcattcaagtgaatgggaaggcgcttaagaccggaagtaagtcagaagacctgcaaggcgtgtatattttcgacggcttcgaggaaaggccggaagagaacgcaagaaccgtatccggtttttactattctttatccaaggttttcttatcaagtcgtctcatggtttcggataattattttgccataataattagggaaagaagcatgaatctgaccgacgggatgagctccgtatgtaagatgcatgctttctttgagtttaaaggactggggtattccgtgaacactctatagagaatatttgtttattattagaaaagtgcgtttatttgcaacgagtaattaacaaaagaagtatgaatatgaagaaaatcgtgggattttttatggttgccttgttagcgttgatggcgcttccggcgaacgctcagcttaaattcggtatcaagggaggtgtgaatatatcgtctgtccatttcaactcggacgtgttgaaagcggataacgtaaccggcttccaagtggggccgatgatcgagacgactttgccgttggtgggtgtcgggatcgatgcggccgtgttgtattcgcaaaaaggtttggagacgacttcggttggcggggttaagacttcgatgaagacggattatatcgatgttccggtcaacttgaaatggaaattcggcttaccgatcgtcaaagcgtatctggcagccggtccgtatatcggtttccgtgtaggcggtgataaattttgggatatcccgggttccgtagcggatcaggtgaaggcgaagaatttcagcgcaggccttaacttcggtgccggcgtggagttgatcagccacttgcaggtgggtttcaattatggtctgggactgactgataactatagcattgagaaggtgaacctctccgacggtgccggaaagaatcgtggatggtctatcacggcagcgatcttgttctaaataggtgaaaataaaatgagagaggctgggctttagaagtccggccttttttgttatttttgggctcgtaatgaaacacctgtttgaatgaaatatgcggacgtcatacttccccttcctttggagaatagctatacctatcggatacccgaagatctggaaagagccgtgactcccggttgccgggtgatcgtgcatttcgggaagaaacgatattatacggccatcgtcatggaggtacacgaccgggaaccggtatccgattttgagacgaaggagatctacgctttgctggatgccactccggtgctccgccgtccgcaactccgtttctggaaatggatatcttcttattatatatgtaagctgggcgacgtgtataaggcggccttgccttccggcttaaagttggaaagcgagacggcggttacttataatgaggatttcgaggctaccgcccccttgcgcccgaacgagcaagcggtactggatgcctttagcggggttttgaaattgacgatctcggagttggagaagaagaccggtctccgaaatgttgtcccgatcgtctcttccttgatggtgaaaggggcggtcgaggtgagcgaggagctaaagcgaggattcgttcccaagacacaggcgtttatccgtttggccgaagcttactgggatgagacgaaattgcaggcggtgttcgaagaattgaaaagggcgaagaagcaagagcttctgttggtcagcttcttggatttaagccataccttgaatcccgctttatcgaaggagctttccaagaaagagctattggaacgcagtggttatacctctgcggtattggagggtctgctgaaacggggtatcttggagagttacgagaaagaggtgggtcgtttgcaagtatccgtctgccgcttgcaagagccgaatccgctcagtccggcgcaagagaaagcctacggagagatccatgaggctttcaagacgaaggaggtttgcttgcttcatggcgtgacttccagtggtaagaccgagatatacgtccgtttgatccatgaggtcttgcggctggggcggcaggttttatatatgttgccggagatcgctatcacgacccagatcacggaacggctggcgaaattattcggggataagctattggtctaccactctaagttctcggacaacgagcgggtggaggtctggaacaagctgctgcatagcgacgagcctatgctggtattgggggtccgttcttccctcttccttccgtttaaggacttgggcttgattatcgtggacgaggagcatgagaatacgtataagcagcaagacccgacaccccgttaccatgcccgtaacgctgccatcgtcttggcgggtatgcacggcggtaagaccttattgggttccgccaccccttccatcgactcttatttcaacgctacggcggggaaatacggtctggttgagttatctacccgctacggtgattgcttgatgccggagattattacggtggacgtgaaggagctaaagcgcaagaagatcatgaaagatacccttttctcccctctgttggtggagaaggtgcgggaggccctatcccggggcgagcaggcgatcctattccagaaccgccggggattcgccccgatgatcgagtgccgagggtgcgggtgggtgcctcgttgcgtgaattgcgacgttagccttacctaccacaaggcgcataatcagctggtttgccattattgtggttatacctaccgcttgccgcaggtatgtccagagtgtaaggggacggagttcaagatgcaaggcttcggtacggagaaggtagaggaggagatcgctgggcaattcccagcggcaaaggtggagcggctggatttcgatacggcccgtacccgcacggcttacgagcggatcatctcggatttcgagaaggggaagacacaaatcttgattggtacccagatgttgtcgaagggattggatttcgggaatgtcagcgtggtcggaatcctgagtgccgatagcctgatgaatttccctgacttccgggcgcacgagcgggcttatcaattgatggtacaggttagcggacgtgccggacgacgggataagcggggtacggtgatcttgcagactactcagccggagcatcctttgatccgtatggtgcagcattttgcttataaggaaatggtgagcttgcaattgagcgagcgtagtatgttccgttacccgccttactaccgtttgatcgtcttgatccttcggagtcggaatgaggaggctttgcaggaaatgtctgctttatacgccgagaaacttcgtgctcgtttgggtgagcgggtgttggggccggttacgccgcctatcacccgggtacagacgcttcatatcaagaagatcgtcttgaagatcgagatatccgccgggatcgctccgcttcgtgagatattggaggggattcatacggagatgcagggatatgtgccgtttaagcagttgctggttcattatgatgtagacccggcttgagaattgaaaatggagaattgagaattgaaaattgatggaaaggagcttagtgatgaaggaggagaaggtacggttgttgtttgtgtgcttggggaatatatgtcgctctccgtcagcggaggcggtaatgaagaagttggtgaaggatgcgggattgggagatcggatcgagatcgattccgccgggatcaccgggtatcatgagggagaccgggcggattcacggatgcgggcgcatgcggcccgtaggggatattcgttggattcgatctcccgtccggtacgtcagtgggactttcatgacttcgatttgattatcggcatggacgaccaaaatataacggacttgaaacggatggctcccgatctggaatccgtcgctaagatccatcagatgactgagttctcccggaataagttgtacgatcacgtcccggatccttattatagcggtgccgaaggtttcgagttggtcttggatctattggaagatgcttgcgccgggttgttggaatattgtaaggatcgtatcctgtgagtttactctgataggctaccttaatccgtttttatgaagcagtctctctatttcgtgtgtgctgatggagggacgatccgctttatcatagatataaaggagattaatttcgctttcttccatcgatacaataacagtaaaagtgatgacccttgcgccaccacttttaccctttcctttggaggtgatctgcatacgaattttgcggagaccacttccaaggtcgataccgagtcggggattttgtgccagttcatcaaggagtgcggcatagtcatttgcgatggatgcgtagtgtttaccaagccgcttgatttctttatcgaaagatttggttgtttttattctataattcatgacgtaactcctctaataactcattcgctggccgtgttctgccggctatcatgtctttcagtccggcatctattccctccagtacctcttccttactaatatattcagtctcttcagtctgtgcttccttttgctgcgcaagacggcggatggcttctacggctttacgcatcaaggtctcatcttcggcgatgatactgagttggcggaataattctgcgttgagttctaatgctgtcatatctttatccttcttttgtctctggttttcaatggcaaatatacgaaatagaatcagttagacaatgcttcggtagtttattcttgtgactgtctttattctattcccgttccggatccttattatagcggcgccgaaggcttcgagctggtcttggacttattggaacgctaaaaacgacctcttttatcctatcctgattacgatgcctatcgtaaggttgctagaatgcccattgttaggttcttataactgcgattataagaacctaacaatgggcattctaacaacctctttttgtgagagcggcgatgacagccgctctcactcgtgaaaccttgcctatcggattatcactttcttcgttatctcattggataggcggacgatatagataccgctagccaagccatctacacgactgtctccggcgggaagccgtaccgtgcggactacgtttccggtgagggcgatcacctgcgctgtcacggagactggcgtacggatcagcaaggctccgctctcggcacggatcaaggtagcgttttccacttgctcgataccggttgtggtatttctcacgataccggtgatcgctacggtcaggttggcggaaatatcggcgatcgtgtacttgccgcttgcgtcgggggtgagggcgtttccgttcacggtcactacggggacggactggtcatagtctgcgtccaaggtgagggtgaaggagaagccgtcgccttcggttaccgtatgcgctccggctgccggggtggtggaggctcctaccaaggaggggagggttacggtataggtagcgggctgtggcgttatgggaggaacgtaagacgttacggcagccgggggcgtggcgagcgctgtggtcgtggtcgtgccgccgtctccggttatggtggcggtaactaggcaacgatactggcctacggttctcgtcctgtaggtattcgaggcgttgcgcagctgcgagtcatccggggcggtagaccatgtgccggcctgtgcgttgaaaatctgccatagatacgtcaaattcatttgggtgccttcgggggcggttatgccggccttaagctccgcgtagccgtcagtggatggtatcggggtgcttgccgccgggtctacccgttcgagggtgatgttgccggggagtgtcacggtgggcactcgtgcggtaagatccgtgaaatggccgttgttggtgaccgcggtgttgacaaggtcgccggcattctcgccgggggtgagcgtcaattcgttgccgggctcgatcgtgaccgcacccagactgttcgtgccgctcaaggtgaggttggtcttcccggtaccgttgatgagggtggccgcggaggttacctcgttgagctttattgtcatatcggtatcggcgggaggggtgagggtgagtttgtttatggtcttgcccttctctccgttgatctctccgttgaagtagttgtcggtaccatcatcttgttggaacttgttctcgtccgttatcgtgatctcgccgttgtctgccggggtgataggggaggcttcgaggtagacctgcgtggtgccgttcatcacgtacccattgcctttcacgccatcaggcagcggtgtggctgtccagatgaaggggttcttcttgccgggcgtgaggtcgagggtagcgccgtctttcagtttccacgagatcggactatctatcacgtcgcctctgtcggtggtgaaggtgagcttgggccatgtggcggcaagatcggccagtatctcatcggcggtcatgatggtggtgacgatccgggtctcggtcggctgtcctaccgcctctgccagctcgctctctttccattgggcggtgagggagagatcgccggtggagcctttcgccacggtcgctaccgtattcccgtcggtgtctttccagccctcgaaggagaggtaggtattggcgtgtgtcggcgtggggagggtgaactcgtccgatactacggtatattgggtggggctgccttgcgggagggtgccgccattcgggtcgtaggtgatcgtgtagcggataagctcggcctcggcggtaaccgtcgtcggctgggcgggcatcgtgaagctacgctgtgcggtgtagcccttgtcgttcggtgccagggtctctgcggtcgtagcgttgccgttgtaggtgatggagcctaccgtcagttggtagccttcctgcgggacgaagaagaggtctaccttggtcccgttgtagacggtctggccggaggatacggcggtgtacgtgccggcggcgttcatgatcattacgtccagcgtcgctccctcggcgggttgctggatggtgaggaggtatgggaagaccgggtcggaaggttgcgccttcgtgctcgtctccggggcttgcgccatcgccggctgcgctagcagggcgagcgtagcggctagcaaggataggatatatctgaatgttctcatatttgtatctgttttagtgtatataatataatgtatgctctacaggacgaccttgatcgttgtaccgccttggtggacgagatagatgccggaaggaagggcgatcgtcgtctcgctgcgcaagagcggcaggtagcacttcaaggtcccgctgacgtggtatacggcgactttctcggcatggtcggcgctaaggtgcaaacgtccgtcggcggcccaagcgcggaagctgttgtccgccggagtctcggccagctccgtacccgtgacgataccgtccaagcggaggctcttcagcagggcttgggtggcggcattggccacgacatagctctcgaagggccgcagggtaacccggtccttcagctcgaagcggctgccgtcgtcgctgaggacgtatatgtttcgcatctccacattgtacgaggcccgattgcccttgaagaggaacacgcccgtgttgagcggctcggcggggctggtaggctcgatgggggagtcggggctgtccttgaaaaggtagatattgccgtaattgaggcgcagcgtgtttgtctccgggccttcgccggcgatcagcacggggttacccgcggcgagtatatgcaggttgtcgggatccgccggctgccaagtctggtcggtggcatcgggatatccggtacgcacgtagcagggggttcccgcgtcgctagccaatttgtcggcggtattggatgctagcgtggtagcccgccattggttgcggttggggaagaggtgggtgaagcgggccgctacgagtcctagcacaccgtcatcggcgaaccggatctgcccgccgtcctgcagctcgagatcattcaccagtggaaatactccattttctcctatcttccctaccgtaaggacacccttctcggtgacgcgcagccattggcccggcatgctcgcgtcgaaggccgtctccttgtcgatcacgatccagacgggcgggacttcgcgcaatcccgtgtagcttgtcagcccgtcgggatgggcggcggggaaggtgctgaggtaggtttgccccgggtcgtcggagcggtagccttcctgtttcaagcccgtcgactgattctctaggtagaaggagagcgggtagttcgtggctatgctcttcatgcctgtaagattgaaggtcagaccattcggattctccgtcggttccgccggtttgaggtagatgtagccagacggagattccggccatgtgagttggacaaggcccttcacggtgccgccgccttcggggtggatggcctgctcggcggctgtcagcgccaaggtgttatccgggtcggcgggcgtcgggatgaggcaggtggctcccgtctctacccggagcgcgtgggttccggacaggcgggggctgtgggtgttgttttggagcctcaccgtcccgctcgctaccgtgagggccgtgcccgtcgggggctggaaatctaccttgtccagcgtaagcgtagcctcgccctcggcatggatggtggcggggatggtgatgccgtagaatgagctgttgcttgtcgtcaccgtcccgtcgaacatcttctcgtcgcagtaccatccgtccgcgggggcgaagaagaggtcgatgccggtgcgggtgctgccgtagccgtagtccttggaaaggtcgagcggccgcggggtggggcaggtggcggtggcgccggagtatcggcagtatgccccgtctgtccggaagaaggggtagtctccgtctttataggaagacccgctgtaacgcctgccggcatatagccgctcgccgtcgagggaggcggtataccgcgtatcggccgcggcgaggaaggcgtaaccccagcaggtcccgtcggtcgcgaaggtggccgccggctcgtcgtcgcctgccggggtgacggacagcgtccggccatcggtcggggcggtatcgaaatccagttcgataaagccgcttacataggtgcagagcgcgttcgcttgcaggtggatccgtgcgttatccccgaacgtgatcgcgtccggcgaggtattgtcgtttttaaaggctgagccacctgttttactgatgacatgtatctctccgtccagatgcatccgggcattctggaagttggagatggcgccgatgctgagcggcgcttgggcatagaccgtgagcgtacccgtgcccgcgggagatccgtttaggataccttggcttatctcctgcgcatcggctacggtcagggtgagcgtgcctaagttatagatgaggtcgctcatgatctcgatccggttctccccctcgatccggagggtcggttccgcgccggccttgatatagaagagctggttgaaacttgaggttatgacggcgtctttcagcgtcagcgccggtgggttgccgctgtcgggatcggcggaggtgagtacgctgtcggaatcggtggaggggtgtatgacgaactgccggcctacctcgggcatcgtgccggtgatggtaccgttgaagggggtgccggtggtcggggcctgcgtgtcggatgcccctactttgtacacccacgtgccgtttaggtacgcgaggttgatgtaccagttattgttcagggtgcccggcagggtggcaaggtcgagtgccccgggaggttccgcttgcgcgcgggccgctgtcgggagggtggcgatcagtgtcgcgacactgatcagcaaggcgaatattcgccttgccggtaggtggatgtcatgtaatgatgttctcatgttctatgtgtataatagggtttataaatcggttgttttttccggcaggtccggtagcccctgtccggcaggcttggcagccgttgtcctcgatgcttggcagccgttgtccggacatgccggacaacgttgtcctcagatctcgtccggactctcgctgtcgcccccaccgccttctcctacgataaggatgatggggaaggtgtaggtgcggggctcttttacgttacggcttccgctgtattgcgtggtgaggctcacggtgtactgcccgtcggccagcgtcggcatctgcacgatcacctgcgagggcgagttggcgatcaccacgggtgccttcatcggcgcggccccttcggtggtgggggtgaggtagacaccgatggagggatcatcaccctgtatcttcaggttcacgccacccagcacgagggctccgccggagctgagctgcccgttgatggccttggaggtggagtcggtcacggtattgatcaccggacctacggccgccacgccgttcaccaccaccttcaccagcttgagggtctcgcgcaagagcttgcccatggtgtaggtgatgccgagggcgtgcttcccgggttcgaactgcgccttctcgccctcgaaggccccctgcacgttgacgaggtattggcccacgccgtccaccacgctcttgccctcggcgatggcctgcaccttgtggctgtcggccatatcgaggatgttgaggatcgtgccgtgttggtactcggtacgcgcagccacgatgcgggcggcgatgtccgtgttatacaatgtcccggtgatgcgcggcttggcggtgtagtcgcccttgcgctcggtgagcaggttatcgtacaagtctgtgttgagaatgatttgttctgccatggtattcctttattaagtgattactgccagcaaagaacggggttcggggtaagaatgagaggacaaatccgggaaaaaagaggacagatctcggaaaaatgctcattgttgcgcctgccgccggtattgggcgggggtgactcccagtattttctggaagatacgcgagaaggtgcgggagctggtgaagcccgcgccgacagcgatctcttccatgctccggctgtcgcccggcatcaacagctcggtacgggcgtggttcacccggtagcggtcgatgtattccttgagcgtgatgttcagcttgtccttgatggaggtggagagatacttctcgttggtaccgagggcacgtactaggtcttgccggctgaaattcgggttgaggaagggtgaggagctggccatatagttttgcgcttgctggaacaactcgtcctcctcgatttccagcaacccgccgataagatcctccaggtccatccggttgggatcggtatcggcgtcggcttgcggggcgaggttgagccgcaggtatagttggtcgtacgtataatggtagttggcgtagtggatcgataccgaggcgtagaagagggcgaacacgaagttgaccgccgtgttatagtaattattcgggaagaaacagaggctcacggcggcgatgccgatacccagcgcccataggaaggcacgggttacccagcgcaattccagtcgctcgggtgattggggtatctgtttcaggttacctagatagatcgcccgctcccggaagaaaaaatgtgtatagccccctagctggacaaggtacacgaggcacgtgagcgtacgtatcagcaggggcgggttgccaagattatcccaccatacgtcgaaacgatacgtatggacatcctcccggaagagacaagcgatcgtgtacgctacggtaagcgcgatcgtaggcatggcgtggaggaggatattcctccgggtcacgttctttcccctgaataagagggtgagcaggaacgtgaacagcaacgcttgcgaggcgctgatcagcaggatggggaagtagaacaactccatgatggttcgctcgtccgtgccggaggacaagatgaagatatgccctatgcctaccaatgccgaggccaaggcgagatacttgcaggccgtccggtacttggggatcgtgctttcctgcaaggtcttcagcgacaacagcagtccgctgaccagaaggcaggtaaaggctacgatccctgtcgaggctaagtagagtaggtggtcgttcatgctggttcgctattgttttttcaagtccggatagctgattcgggtatggaacatggttttcagtttgtctacgaatacgctctttatggtctccacgtccttgaaggtcagcggagcgctctttagcaagccgtcggcgatctgcccgtcgatgatcttgttcaccaaggcgctgatactctcttcggtatgttccttcaagctgcgggaggcggcttccacggaatcggccatcatcagtacggcggtctccttcgagaagggattcgggccggggtaggtgaatagctcgtcgttaatcggcttgtccgggtattggttcttgaaagagttgtaaaaatacttcgccttgccacgcccgtggtgcgtacggatgaagctgataaccgccttgggtaacagggccttctcggcgatcttcacgccctcggtgacgtggctgatgatgatctgcgcgctttggtcgaacgataactggttatgcgggttcacgctcgattggttctcggtgaagaagacggggttgctcatcttcccgatgtcgtgataaagggcgccggtacgtaccagttgggcgttggcgccgatcttggcggccgcctcggaagcgaggatggatacctgcaaggagtgctggaacgtgcccgggcaagtctcgctaagcttcttcaagatcgggttgttgatgttggacagttccactagcgtgatgctggacacgtatccgaacgtcttctccaacatatataccaatacgtaggtgaacatcagcaggatgaagttgataccgaaataaagcatcatcatccagttgatcttgtttaagttcgcctcttgatacaacgtgagactgaggtagcaggcggcgtaggagaggaagatgaagacggcgcaacggatcagttgcgaacgttcgctcaactccttcaagctgaacgtcactaccatacccgccacgatctgcaacaacaggaactcatgcgggaaaggtaccatcaacgagcagatcagcacgataataaggtgcgtgaaaagcgccgtccgggaatcgaagaaggtacgtaccacgatcggtacgatggcgaacggcaatatatatacgttgaataatgcgtaggtaacacatagttccgtaaagatgcagctcacgaatatgcagaggatcaagaatagtacgttcttccggttatggaatatcttcaagcggaaagaccataggtagagccagaaacagaacatcagcccgaagacgagcacgaattgcccggccagtatgatgccttgcgtctgcgtgccccccgtcttggcctcgtgtatggcctttagggaacggagcacgttgtaggtatggttgtcgatgatctcgccccggtctacgatacgctctccggcttgtaccataccgttagcgatagatacgctctgtagcatatcctccttgatcttgtcggacatgtcggcggcataggatatgttctcggtgaggtagttattgatgtcacacgattgcaggatcgatttgtccagccgcggcgggcagttgttgataatgaactcgtaggcggtgcgcacggtgaagaaatcgctcacgtagcggggctgcgcgacggcgttctccaagaggttgacacgggagtattcctctttccgtagctcgtccagatcctgcgacgagatgataccgttcttgtataagttgatcaggctgctctctatatactgcatgtaagcgggggatactttgcttcgcaagttattgccgttattgtagttggcacgcagtttctcgacctcttgcttctggatgtcggggttcatgcggtaataaggctcgaacttacggagtacgctgtctttctccgcttttacctcgtcgtcggtcttgtagatcgggaaatcgctcggggcggtgagtaatccatatctccaaggcttgccctcatagaactgataacggaattttccctcccgagggaagaagtaggcgataagtaacgcggtcaccacgaagtagaccacggtcggtatattgtaattcttctgtttcatatagattcctttttgcgtccgaaatatacgtaaaaaacttcactaagcggaaaaaaaggcgtacttttgccgcattattatagaatgtaagtattatgactcaaagaaaagtaagagtacgcttcgcacctagtcctacgggggcgctgcatatcggaggtgtccgcacggctttatacaactatttattcgctaaacagaatggcggtgatatgattctccgtatcgaggatacggattcccaacgcttcgttcccggggcggaagactatatcatcgaggccttgacttggctgggtatcaagttcgacgagggcgtgagcttcggcggcaactacggtccgtatcgccagagcgagcgtcgtgagatctacaagaagtatgtcgatcaattgctgaacgatggccatgcttatatagcgttcgatacgcctgccgagttggaggagaaacggaaggagatcgccaatttccaatacgacgcctctacccgttcgcaaatgcgcaactcgttgacgctttctccggaagaggttcagagcctgatcgagtcaggtcatcagtacgtagttcgtgccaagatcgagccgaatgaggatatccacgtgaacgacttgatccgtggcgaggtcgttatcaactcctctatcttggatgataaggtattatataaatcggccgaccaattgcctacttaccacttggcgaatattgttgacgaccatttgatggaggttacccatgtgatccgtggtgaggagtggttgccgagcgcgccgcttcacgtattattatatcgtttcttcggttgggaagatacgatgcctagtttcgcccatctgtcgttgctgttgaaaccggaaggcaacggtaagttgagcaagcgtgacggcgatcgtctgggcttccctgtattccccttggaatggcacgatccgaagacgggtgatgtttcatcgggctatcgtgagagtggctacttccccgaggctgtcgtaaacttcctcgctttgctgggctggaacccgggtaatgaccaagaggtgatgagcatggatgatttgatccgtttgttcgacctgtctcgttgcagcaagagcggcgctaagtttgattatgagaaaggcagatggtttaaccaccactatttgctggagaagagtaatacggagatcgctgacctattcttgccgatcgtggaaagccacggtatccagactacccatgcttatgtagagaaagtagtcggcatgatgaaaggccgtgtcaatttcgtgagtgagttatgggatctttgctctttcttctttatcgccccgacggagtacgatgagaagactcgcaagaaacgctggaaggaagattcggctgttcaattgggggagtttatcgagcaactgcgtgcccgtgagccgttcgacgtagaaggtaccgagaacgagtgcaaggcttggatcgagagcaagggatatcatttggggaatatcatgaacgccgcccgtctggccttggttggcgagggcaagggccccggcatctttgatattaccgaggctttaggtaaagaggagtctatccgccgtatccaacgggctatcgagatattaaaataatcatgtacagtttagcaatacatctctacgcttttgtagtcgctttgatctcgcctttccataaaaaggcgagactgatgcgattcgggcaatggaaaacaaattccatacttcgtgagaagatcgaccggaacgctaaatacatctggttccatgcctcctcgctgggcgagttcgagcaagggcgtcctatgatcgagaagatcaaggcggaacatccggagtataaggtgctgctgactttcttttctccctctggctatgaggtacggaagaattacaagggagcggacgtgatctgctaccttccttttgatacgcctttccgggtgaagaagttcctgaatctggcgaacccggcgatcgccatatttatcaagtacgagttttgggggaactatttgcgtgagttgcggaagcggggaataccggtttatatcatttccgctatattccgccccgaccagctatttttccaatggttcggaaagccgtaccggaagatgctatcttattttaatcatctttttgttcaggacgagcgttcgatgaaactcttgaacgagttcggcatcacgaatgtgacggtgaccggcgatacccgttttgatcgggtgttggatgtccgtaagcaagctcgtgagcttccgtttatcgaacgtttcttggaaagcaaggaaggtaagaggccgatcgtgatggtggccggcagttcatggcctcaagacgaggcgatctttatcccttatttccatgagcatccggagatgaagttgattatcgccccgcatgagattcaccgggaacatctcctttctatcgaggcgatgctaaaacgtccgtccgtccgtctatcggaggcgcatgaggatgatctggccgataaggattgcttgatcatcgacagtttcggactcttatcttccatttatcgctacggacagatcgcttatatcggtggtggtttcggagcgggtatccacaacacgttggaagccgccgtttatgggatgccggtcttattcggcccaagataccataagtttaaggaggcgaaggatctgatcgccataggtggtggtttctccatcacagacgattcctctttccgaacgaagatggacgagttattgaccgacccgacagccttggaaacctccgggcaagctgccggtgattttgtgaaaaacagtgtaggagcgacggatcaaatcttgcgacaaatccatatccgttaatagataaagccgggtttgctattcgagtgattgtatgcccagactcttttgatatagcaatggaatacggatgagatagatgtacggattggtaattgaacgattcgcgttgtctatctcatccgtattttattttaatcctcttcagagaacatcgggtcccaagcgggaagacgagtcggtgtttgtttcaagatctcttttacttgatccgtgatgtactttttgttgactaccagacggaacatatactcattaaaccattggtctgtcatgatgaggtggccggcgttcgctccgggaccccaactattctcaaccatccatttcttcggctttccattcgcgtcgagatcaacagccatcaaggtcatggcgtgtgaggaaccgctggcgaatgtctggatacgttgtttcttatccatgccgaaagtcgtacccatcaatgaaccgtaatcgtagaagtttacatccagaatacctctgtcacgatcgaagaacttgcccacgtcgcaagagaaatacatcatggtactgtccttgatggaagcgatagccatttgtttgatatcctcgatcggaaggtttacgtaagtccagttctttccatcgtaagcgtggcggtcgtaatcgatctcatacaacttataataatcgcggctcggatcgttcatcaacatgacatagttgtttttcaaatcgtccccgatatattcttggaagaaggactgaggcgtatattccttcgtctctaccggattccctttagcgtctttgcgagtccacgtgaatttcgtaggcggctctcccaagttcaatacgagcatacggtaaatcgtacctagcatctcggtcttctttttctccagatccgctacggtcgtgcctttggtcgtagacaggtcacgaagttgcaagccgtattctttcagctttaatccgatcaggttgctcatgcgtccggtactgttgctgctgttggtctctaccatgacttcggcgggaaccacgccatatttggtcaagatatcggagacacccgtgaactgccctccgtctccgatcgggttcttgaataaccattccaccatcttgtcgtccattggtttcagacgagtatcgatgatgccctgtaagaaaaggttcgctttctccaattgatcccagaagaaagaataattctgggagaattgaaagtctcccatgtcatatttggcgatggcctgcgcacggaacacgttcaatcccgtgaaaagccagcaacggcccgaggaacgttggttggagatccctttgctctctaccttattggagaagtaagtatccaaattgttcttgctctccccattaacggcaagcttgttgatgtcgttattggtgatcgcgttacggatcgccttatcggtcggcgttccttgataagactgtttgatttgctgcaacatcgtgggtgagatgcctccaccactttgttgtccgtgagccgatagcgtgatgcctaaagccaaggccgctatccataaattcttttgcttcatgatattttagttgattaataaattgtgttatttctttttaggccataccagaccgtcttgccggatattccataccgtaccgtctggtgcgggtagtgatatctcatacatggaaggtgtcgtatgtatttccagttgattggcgatctcttgcgggcatagctcgtttgccttcaagtcgttgatgttatcggcataatgtccgaaggtcgcggcgaactcattctgacggtaatataaattacgcaagatccatttcgtctcctccgaaggatgttttacgaaaggagtctcaccttctcccgcaatcttatccgatatttgaacataaccccagtattcgggcatatggatattgattaccccggtaggcgcccatacccagttgtactcgcgaatcttatcctctccttggatagggactttcacgtatttaccgtctttcacgtccgttgtccattccacacgagagaagttcacacggatctgctcgccgatttccggcttttcttttcctctgtccatttggaatacggaagtccaaggaatgaatacctctacgctccatgatttatccgtgtctttcgggttattcagcgtaccgtccacataaacagcggatttcattccggtaaactcccagttattcaatacttgcggattatcccgataggggcgggttaagaacaagtcccattccgtacccaaggcgttcacctcgtactccagataattatgggtgtcgttcgtaggattcaggaagatctcgaagtcgttgtcgtggaagatcacggcgtcgtgttccgtgatggtcgcccatacgtgcggctcctccataaggacggcgaagtacattccgttatcatcgtaagtcatcttggcccgggtctggaagtgaggggccgggcgtttgtcgccttcgatatctacgaagtcgctggtccaaggtattgcgtcccattccccgggagaaagctttccgtcgatcttgataggagcgggggccttgtagcaaacatacgtcggcggattgaacggtggttgcggcatatacgtgatgtctggcttttgcgtactgggtttctgtgcgcaagaaagcaataggagtgccgccaatggcgctgtcgttaaaatcgtttttctcatgtgcgtttatttttagatcgtttgataaatagattcttattgaagtaagtccatcgccgcgtccaaccatgtatttatatcgtccggataatgttggtcggcggtataagtatcgctgcgtttgtgcccgagtcttacgatcacggcgttcttttccgggagcgtgaagacgtattgccccaagattcctctcatataagggatcttcatccctttgtaatcgagaatccagtattggaatccgtaacaatggttgggtttgccgagatccttatagacaagacgggtatcggggcttgtcgcttccgccaaataagcgggagagatcaattgccggtcatcccattggccgttgttgagtaataattgtccgaagcgggcgaaatcacgggcgttactgttgaaacagcaataggctttttccatgccgtccttccggtcgaggctccaaagggcgctttcctcggcgtgcatcggagtccatagtttgcgggatacataatcgctgagtttctcgccggtagccttctccacgataaagcccagcagttgtgtcacgccgctttggtagataaagtttacgccgggctcgtcgatctctttcatcccgaaggcgatttcctgtaggtcatcgccataatacaactgggtggtaggagagaaaggagagctgtaagcctcgtcgaaatccacgccggcgctcatggtcagcaaatggcgaagcgttagggcttttccgtcgtatcccttgaattccgggaaaaagtcgcttaccggttgatcgacgtcccggataaatccatcgtcgatagcgcagccgatcgctaacgagacgatgcttttcgccatcgagaaggagttgctatgcgattccggcgagtaatcttcccaatattgctcgaatagcaatcgattgtcttggatgattacataggcaaccgtacccagctcctcaaaccggggaagataacgctctggaatacttttcgtattgtaagcttccgatagttcccaagggcggggcgaacctgcctgtacgacccggttctcgaaaatcggatattgatcgatcttgggtaataaatggataagggccctacgtagataataattggagggtaacgccagatatccgcctattcccagcataaaaataaacactatccatcccactcttcgggacaaatagtgtttattggctggaaccctattatttgaatcatttttcatgtaaccctttggttgttactttacagatacaaatatatggtttataattcaaataatcaaatacatgtccttattctttataccaagaagaatacatatggtagtttttggctattttctggttgatctctttcgcttgctcgggatctaccttcttgacgaacttagcgggaactccggcgtagatactgcccggctcgacgatcgtcttgcttagtactacggaacctgcggcgatgatcgctccctcgcctactacggcgtgatccaataccacggagcccattccgatcaaggcgccattgcaaatcttcgccccgtggatcgttacgttatggccgatggatacatcatcgccgatctcgattgtcgatttctcatataaggtgtgaaggacggaaccatcctgtacgtttacgccgttgccgatgcgaatcgagttcacgtcgccgcgaagcacggtgccaaaccagatactgcaaccttcaccgatctctacgtcacctataatcgtggcgttgtctgctaaaaaagtgtctttaccgatcttcggggtaaagccacgaacggatttaattaatgccatttttagttgtttaaatttctgttgttttctctttcagccaagctttctcctcctcgttcaagaacgggctgatcttgtcgtagaccatttggtggtacttgttcagccaagcgtgctcacggacagagagcatggggatgataatcaagctcgtgtcgatgaaacaaagcgtcagcgtatcgaatcctaggaatttcccgaattccgtttcgctgtcctcacgtaccaagatcatgttctccgtacggataccgtattcgccggtacgatacatggccggctcgtcgctgatcaccattccgggcttcaaggtcaccgggttctcctccatgcggatgctttgggggccttcgtgtacgtttaggcaatggccgataccgtgaccggttccgtgcaagtaattgattccggaatcccatagcgctttacgggcaaggatatcgatctgggaacctcgtgttccggcgggaaacttgcttttcgccaagctgatcgtacctttcaatacacgggtgaaatcctttttcatctgctccgtcggctctccaagggcgatcgtgcgggtgatatccgtcgtaccgtccagatattgcgcgccggaatcgatcaaaagtaatccttccggtttcaaggtcgcatccgtctccgtcgtagcggagtaatgaacgatcgctccatgctcggcgtagccgcagatcgtgccgaagctatccatgatgtattgcggttgttccgcacgtaaggcggtcagcttctcggcggcgctgatctctgtaacttgggctccttccgccatttgtttctccagccagatatagaattttgtcaaggcgacaccatcttttaccacggcgttttggaagcccttgatctcggtctcgttcttgatgctcttcaagtggttggcgggggagatcccttccacgatcgtacagcttcccgggatcgcgtcgtataaggagacgttcgtcttgttcatatccacgaatacccggctgttttccggtaggcgggatagatacctctggatcatggagtattcggccagcgtaaccccttctttcttcaaatgctcggtgatctcggcagtcagcttctctggcttgatgaaaagcacgctctcatcctccgatacgaaggcgtagctgactacgaccgggttataggtcacgtccgtaccccggatattgaatgtccacgcgatctcgtccaaggcggcgaggatcaagcaatcggcgccctcgctccgcaactggttattgattaggtctagtttctcgtgcacggaggctccgcttaatgcttccggcatctcgaatatcgggtttccgggaacggcgggacggtccttccagataccctcgatcaggtcggccgaggtatccagcttgatttctttacggcttagtttatttgccaaggcactcgcttcggcggcgctataggtttgcccgtccagccctacggcctgtccggtgtgtaactcatgcaagaggaattccgtgatagacggtgtctccggaagcgccaacttatagagttcgataccggaaccttccagttggctggccgcttgcaggaaataccgggaatcggtccataagcccgccttgtccgcggtgaccacgatcgttcccgccgagccggtgaagccggatatccattctctcgatttccagcgatcggccggatactcgcttaggtgcgggtcggaactgggtatgatgtaagcgtcaaccttctgttgcttcatagcctcccgtagggcggcgatacgttcaggaatgtttgttttcatcgcattttattttagtcaacattaatactcgcaaagttaatgaattattttggatttgtctcgccggaaaccggctcttctaccttataatatagatgggaagtacctagtttttcccaccgcagtttcccttcctctaccagccgccgcaagtcgagggaagccttacttctggagcatccgcagagcgacatatacttcttctggtggataaaagggttcgtctccagataacggaatacctcttgctcgcattccttggcggagggatatgcgggatcgctaaccgtgtactcgtcacgaaacaccggcatggtcttcagccggtctcttagttccttggacgatctgaacttcacgtccttaaaatggatggattccgcccggacctcattcttttccatgacgggccggcttttcagtgagacgctgaaagtaccgatcccctctagctccacgttataaccgaacatgagaaagtccaccatcatgtcttggaagagctgcaagatccctttcatatccgcgggcgagaaagaagaccgtgacttcgctctattgatgaactcatccgtatgtatcgtcccgcaagagaccaaacgaggatgtaggggtaatgacttcccggattcctctggattcgggttgggatttctgactagcttgtaatttgctgacatctgtgctgtgtttaaatggttatagatcttttgtctgattcttctggatcgcttacccgtttctataggcgagcttagcggtttcttcaagaaggattcatcttccaacagccgttgcatgatcatgcaccaactgttggacgatcatctaccatccgttagatgatcgtctaacagatggtggataatgaatacttcagcttcaaaggtacaatatataaaagagaaaagggtaaggattccggataaaagagctaaaggttatgataaacgtgtatgggctcacagccttgtggtccacaaccttgtgaaccgatccctttaaatcaagttaaagataaggcacccaatagatatcaaggaataatttgctagctttgtagaaacaaataagaagtgccatgaggaatctgctttatctttttgtctttgcggctctgcttctcggcttgagcgcatgttcttcttattattattcgatgttgaactcgaatgaccccgtcggggagaagaatgagagaggtgattttgtgcaggaaaacgatacggtacgtatctcttatcgtttctggggagagaacgccccggttactattaccatttataataaactggatgaacccttgtacgtggattgggggcggtcggcgctgattatcgatgacgtggctaccacctacgacccgaaagtggcctcggtgagaggcgagagctctagcgtggcatccggtagctcctttcattggagcgataggagcagcagcgggtggagctactcggaaggttccttctccggtgatgtgagtttgccaaagggcgttgagtttatcccgccgcattccaaattagtcaatacgcctttgcaattagccaacttcccgtttaacgagatcccgaaagaagagtatgtaaaggaacaaatgacaacgaaagcaaacacaaccgtaaatatccgagtgaaggattttacagaagaagattctccgctgagattccgtagctacctgacgttgttcgccggagggactaatgggaagcccttgaagcattcctcttttgagcggaacttctatctggcgaaattgatcaaggtcggcgacgtggctccccagtatttcgatgagggacagcagcaatccggcgatttcttttacgtgaaagagactcatggggctacggcaggccttgtcgtaggagcgatagcggttaccgccgcaggggtggcgatagaagctacgctgggtcccgtgaactattaatatattcatatcgaatgatacaaactctatctgatttaaagaccgtgcgtttcaacgagcaagcggacggtgtgatcattttggaccaaactctgctgccgggtaaggaagcgtatctgacccttaccactgccgaggagatatgggacgctatctataaattaaaggtacgtggagcacctgctatcggggtagcggccgcttatggtatctatgtctgcgcccgtcggatcgatacggcggagaaatccgttttcgtgaatgagtttcggaagatcaaggagtatctggccggttcccgtccgacagcggtgaatctggtggcggcgctgaaccggatggagcgggtattggtcgctcatccaaccttgtctgtcccggaatggaaagagctattatataaggaagcgatcgcgatccgggaggaagacgccgccgcttgccggcagatcggcgagaactgtctggagctactccgtcccgggatgggaatccttacgcattgtaacgccggacatctggcggtctcggagtatggcaccgctttggcgccgatttatctggggcaggagagaggttatggtttcaaggtcttcgccgacgagacccgtcctttgttgcaaggcgcccggctcacggcctatgagctaagcagggccggcgtggacgtgacgctgatttgcgataatatggcctccgtcgtcatgcggaaaggctgggtgcatgccgtggtcgtaggttgcgaccgtgtagccgccaatggcgacgtggcgaataagatcggcacgtctggagtggctatcttggcccggcattacaagatccccttctatgtattaggcccgacatccaccatcgatggctcgtgcccggacggcgattccattgtaatagaggaacgtaaccccgatgaggtcaccgagatgtggtattcaaggcgtatggccccgaaagacgtgaaagtctacaaccccgccttcgacattactccccacgagctaatcacggctataattacggagaaaggcatcttttataaaaataatcgctgaaagttttgctaatcccgaaacaatcagtaattttgccgctcaatttgaggatataaataattaaacaatataacaatttaaattatgatcgtagttccattaaaagaaggcgaaaacatcgagaaggcgcttaagaaattcaagagaaagttcgagaaaacaggtgtagtcaaggaattgagaggccgtcaggctttcgagaaaccgtctgttacgaagagaaagcagactatgcgtgctatctacgtacagcatttgcaacaagtagaagaataattatagcttccgggcttgttttattgaattcttattcctattttcgttgcatgaatgttgatgcaacgagaatatgctgatcgatgactttctaaactatctccggtatgagcggaactattccaattatacgattggtgcctattcgaaagatttggaccaattccagaggtatgtaagagagcatcgagaaggtgtattcaaccccggggaaatcgactcggatttcgtgagaagctggatcgtcagtttgatggacgagaagctctctcccgtatcggtaaaccggaaattaagttctttgaaatctttttttaagtttctcatgaaacggggcattgtctccgcgaatccgttgagattggtgagcggtccgaaaacgaagaaacccttgccttattttattaaggatagcgagttggaggcgttgttggacggggacggatttgatgaggattttgaaggtgtgaggaatcggttggtcattgagatgctatacgataccgggatgcgccgctcagagttaatcggcatacgaaacgtggatgtggattatgaggcgatgcaggtcaaggtaaccggaaagcggaacaagcagcggttgattccttttgcggagggtttaaaaaacttaatgcttgcatacacggaagtccgtgatcgtgaggttgaggcagccggtgaatggtttttcgttcgaaagaacgggaaccagttgtcgacggggattgtttataatatagtaaaaaagcaattgtcggagatacccatgctggcgaaacgaagtccacacgtgttacgacattcatttgcaacgagtatgttaaacaacggagccgagctgaacgctgtgaaagatttattaggtcatagcagtttagcgtctaccagtgtttacacgcatacaacctttgaggaattaaaaaaagtgtatcatgctcatccaagagcaaaaaaagaaggaggttattatggacgttagaattcaagcaattcatttcgacgcaactgcacagttggaggcgtttattcagaagaaagtttctaaattggagcaatacttcgatggtattatattggcagaggttacattgaaggtggttaagcctgagacggtgaagaacaagcaggccagtataatgttgtccgtgaagaacggggaatgtttcgctgataaaataaacgatactttcgaaggggcgatagacgattgtgttgaggctttggagaagcaactggttaaattcaaagaaaaaatcagagccaaataaaaaaaacggtagataaatttggtatgtaagaaataatatctaaatttgcagccgtttcgccgtggtgacgaaacggctgcttttagaagtatcgcctctttagctcagttggccagagcacgtgatttgtaatctcggggtcgttggttcgaatccgacaagaggctcaaaagaatgtattggaatgggcagttaccagagtggccaaatggggctgactgtaactcagctggctttcgccttcggtggttcgaatccatcactgcccacacgaatgaaacaagtgagagaatcggttggttcattcggtcttgcggaagtagctcagttgatagagcattagccttccaagctgagggtcgcgggtttgagccccgtcttccgctcttataagttgcctgtgtagctcagcggtagagcacttccttggtaaggaagaggtcccgagttcaagtctcggcaccggctcaattgaaaattgaacatgatcattaatcaaataaagaacaattaagttatggcaaaagagaaatttgacagatcgaaaccacatgtgaacattggtacgattggtcacgttgaccacggtaaaacaactttgacagctgctatcacaacagtattggcaaagaaaggtctttcagagttgcgttcattcgattctatcgacaacgctcctgaagaaaaagagagaggtatcacaatcaacacttctcacgtagagtatcagactgcaaaccgtcactatgctcacgtagactgtccgggtcacgccgactacgtaaagaacatggtaactggtgctgctcagatggacggtgctatcatcgtagttgctgctactgatggtcctatgcctcaaactcgcgagcacatccttttggctcgtcaggtaaacgttccgagattggttgtattcatgaacaagtgtgacatggttgacgacgaggaaatgttggaattggttgagatggagatgagagagttgctttcattctatcaattcgacggtgacaacactccgatcatccgtggttctgctcttggtgcattgaacggtgatgctcaatgggaagataaagtaatggagttgatggaagcttgtgatacttggattcctctgcctccgcgcgaaatcgacaagccgttcttgatgccggttgaggacgtattctcaatcacgggtcgtggtactgttgctacaggtcgtatcgagacaggtattgttaaggttggtgaggaagttcagatcatcggtcttggcgctgctggtaagaaatctgttgttacaggtgttgagatgttccgtaagttattggatcaaggtgaggctggtgataacgttggtttgttgcttcgcggtatcgataagaatgagatcaagcgtggtatggtaatctgccacccgggtcaggttaaagagcattctaagttcaaggctgaggtttatatcttgaagaaagaggaaggtggtcgtcacactccgttccacaacaaatatcgtcctcagttctatatccgtacattggatgtaactggtgagatcactttgccggaaggaactgaaatggtaatgccgggtgataacgtaacgatcgaggttgagttgatctatccggtagcatgtagcgtaggtcttcgtttcgctatccgcgagggtggacgtacagtaggtgcaggccagatcacagaattagagaactaattcaagcattagataatgttatagccagtctttttaagggctggctatttctacggaagtagctcagttggtagagcactggtctccaaaaccaggtgtcgggagttcgagcctctccttccgtgctaaaatctatagattcgatgaaaaagataattacttatattaaggaatcttataacgaacttgtttataaagtttcttggcctacgagagcagagctttccaatagtgcggttgttgttatgtttgcttcccttatcatcgccgcattgatctttgttgttgacggggccttcgaggctgttatgcgtttcttctacaaccaaattttctaatcagttaaggtatgtctgatatccaaaagaaattttatgttctgcgtgccatcagtggcaaggagaacaaggtacgggaatatctagaggctgagctgaagaatacggatctgggagaatatgtatctcaagtcttgattccgactgagaaaacctttacggtacgaaacggtaagaaggtcatgaaagaaagggcttacttgccgggttatgtgctggtcgaggctgctttggtcggtgaggttgctcatcgattgcggaacattccgaatgtgattggtttcttgggtggttctgatacccccgtgccattacgtcctgcggaagtgaatcgtatcttaggtacggttgacgagttgcaggaacaacaagaggatctggatatccagttctatgttggcgagagtgtgaagattacttttggaccgttcagcggtttcacgggtataatcgaagaggtcaacgccgagaaaaagaaacttaaggtgatggttaaggtcttcggacgcaagactccccttgagttgggttatatgcaagttgagaaagaatagtactctggttacgaaaagtgctacctttctgttattgatgttatatatctaaaaaattttagaaacaatggctaaagaagttgctggacaaatcaaattgcagattaaaggaggagcagcaaacccttctcccccagtaggacctgctttgggttctaagggtattaacattatggagttttgcaagcaatttaatgccaagacccaagacaaggctggtaagatattacctgttgtaattacttactatgccgataagtctttcgactttgtcgttaaaactcctcctgtggcaatccagttgttggaagctactaagaagaagagcggttccgctcaacctaaccgtgctaagatcgctgagatcacatgggatcaggtgaaagctatcgctgaagacaaattagtcgatctaaactgctttactgtcgagtcggccatgagaatggttgcgggaacagccagaagtatgggtatcactgttaaagggacattcccgggtaataattaataaacttcaattgagatgagtaaacttacaaagaatcaaaagttggctttgggcaagattgaagctgggaaagcatatacattgaaagaagcttcagctttagtgaaggaaattactacaactaagtttgacgcatccgtagatgttgatgtccgtttaggtgttgacccccgtaaggccaatcaaatggtgagaggcgtggtttcattgcctcacggaactggtaagcaggttagggttctcgcattatgtactccggacaaggaagctgaagctactgccgctggagctgactatgttggattggatgagtatattaataagattaaaggcggttggactgacattgatgttatcatcactatgccttctatcatgggtaagatcggtgctcttggtcgcgtattaggccctcgtggtttgatgcctaacccaaagagtggtacggttaccaatgagatcggaaatgcggtgaaggaggttaagcaaggtaagatcgactttaaggtagataagagcggtatcgttcacacatctgttggtaaggtgtctttcactccggaacagattcgtgacaatgctaaggagtttatttcaactttgatcaagttgaaacctactgcggctaaaggtgcgtatataaagagtatttatctttctagtactatgagtgcgggtattaaaattgaccccaaatcagttgaagaaaactaaaaaacaattgaacaatgagaaaggaagataaaggaactgttataggtcaattaactgaaacattaaaggaatatcctaatttctatttgacggatatcgaggcgttggacgctgagaaaaccagcaaattgagaagagagtgtttcaagcgtgaggttaagttagtcgttgtaaagaataacttgcttaagaaagcgttggagaacattgaaggtgacttctctgatcttaacgtagctttgaaaggcaatacggctgtgatgttctcacaagtcgctaatgctcccgctcgcctgattaaggattttactaaggacgctaaaaaaggtgtagtcgctaaaccggctttgaaggctgcttacgtacaagaaagcttctatgtaggtgctgagaatcttgaggcattagtaaatatcaagagcaaaaacgaacttattgccgatgttatcgcattgttggaatctccggcgaagaacgttatctctgctcttcagtcatcaggacaaactatccatggtctgttgaagactttggaagaaagataatttttcattaaaacattacacagataaataatcatttaaatcatacaaaaatggcagatttgaaagcttttgcagaacaattagtaaacttgaccgttaaagaagttagcgaattagctactatccttaaagaagagtacggtatcgaacctgctgctgcagctgttgctgttgctggtcctgctgctggtggtgctgctgccgctgcagaagagaagacttctttcgatgttgtattgaaagcagctggtgctaataaattagctatcgttaagttagttaaagaattaacaggtcttggcttgaaagaggctaaggatatggtagatagcgctcctagtgcaattaaggaaggtatcgctaaagctgatgctgaggcaatgaagaaacagttggaagaggctggagctgaagttgagcttaaatagtatttataacctggtttccaggtgatttggttaagagtctccgactacgaagactcttaacctttttgtgtctataatttcaataagttcaataaattccttactagatgtcttcaacagctgaaaaccaaagagttaattttgcttcgataaagaatcagttcccgtatccagactttctcgaagttcaattgaagtcgttccaagactttcttcaacttgacactcctcctgaaaagagaaagaaggagggattgtataaggtatttgccgagaatttcccgattgcggatacccgtaacaattttgtgttggagttcttagattactatatagatccgcctcgttactgtatcgatgagtgtatcgctcgcgggttaacctatagcgtgcctttaaaagcgaagttaaaactgtactgtacggacccggatcatgaggacttcgatacggtgatccaagatgtatacttaggtctgatcccgtatatgacggacagaggtactttcgtgatcaacggcgccgagcgtgttgtcgtgtctcagctgcaccgttctccgggcgtattcttcggacaaagcacgcacgcaaacggaacgaagttgtactccgcacgtattatcccgttcaaggggtcatggatcgagttcgctacggacatcaacaatgtgatgtacgcttacatcgaccgtaaaaagaaattgcctgtaactactcttttgagagctattggttttgaaagcgatagagatattcttgaaatcttcaaccttgcggaagaggtgaaggtgacgaaagcaaacctgaagaagtttatcggacgtaagctggccgctcgtgttttgaagacttgggtggaggatttcgtagatgaggataccggtgaggtggtttctattgaacgtaacgatgtaatcatcgaccgtgagtctgtattggatagtgacaatatcgaggctatcttggattcaggcacgcaaaatattttgttgcatcgtgaggaccagaatctgtccgactatgctatcatatataatacgctccagaaagacccgagtaactccgagaaggaagctgtgttgtatatctacagacagttgagaaatgcggaaccggctgatgaggctagcgcacgcgaggttatcacgaacctgttcttctcagagaaacgttatgatctgggtgaggtgggacgttacaggatcaacaagaagttaggccttactacaagcgctgatgttaaggtcttgactaaagaagatattatcgagatcatcaagtacctgatcgagttgatcaactcgaaggctatcgtggatgatatcgaccacttaagcaaccgtcgtgtacgtacggttggcgagcaattgtataaccagttcggtattggtttggctcgtatgtcacgtacagttcgtgaacgtatgaacgttcgcgataatgaggtgtttactccgattgatttgatcaacgcgaagacgatttcttccgtggttaactcttttttcggaacgaatgccttgtctcagttcatggaccagacgaacccgttggcggagatcacgcacaagcgtcgtttatcagccctaggtccgggaggtttgtctagagagcgtgccggattcgaggttcgtgacgttcactatacgcactatggtcgtctttgtccgattgagaccccggaaggtccgaacattggtttgatctcttctttatgtgtatacgctaagatcaacgatcttggtttcatctcgactccgtaccgtaaggtggcagatggaaaggtcgacttctctgaggaaggcttgcaatactacacggcggaggaagaggaagagttgacaatcgctcaaggtaatgctccattggatgataacggtaagtttatccgcgataaggtgaaggctcgtttcgaggctgacttccctgttgtccctccttctgagattgacttgatggacgtggctccgcagcagatcgcttctatcgcggcttcactgatcccgttcttggaacatgatgacgctaaccgtgcgttgatgggatctaacatgatgcgtcaggcggttcctttgttgcgtacggacgctccgatcgttggtaccggtatcgaggcgcaggttgctcgtgactctcgtactcagattatggctgagcgtgagggcgaggttgtgttcgttgatgctacttgtatcaagattaaatatgaccgcacggaggacgaggaattcgttagcttcgaggatgcggttaagacatataatatcccgaaatggcgtaagaccaaccaaagtacgacagtcgatttgaaaccgacctgtcatcgcggacaacgtgtgaaagccggcgatatccttaccgagggttactcaacccagaaaggcgagcttgctttgggacgtaacgtgaaggtggcttacatgccttggaagggttataactatgaggatgctatcgtgttgaacgagcgtatggttcgtgaggacttctttacgtctgtccacgttgacgaatacatccttgaggtacgtgagacgaagcgtggtatggaggaattgacttccgatatccctaacgtcagcgaagaggctaccaaggatttggatgagagaggtatcgttcgtgtaggtgctcgcatcgagccgggtgatatcttgatcggtaagatcactccgaaaggtgagtctgatccatctccggaggaaaagttgttgcgtgctatcttcggtgataaggcgggtgatgtgaaggatgcttccttgaaggctactccgtctttgcgtggtgtggttatcgagaccgctttgttctcgaaggctgtcaagaaacgtaaatccagattgactgataaggcgatcttgccgaagttggacgaggaatacgaagaaaagatggctagcttgaagactttgttagttgataagttgttagtgcttacaaacggcaaggtttctcaaggtgttaaagactatatgaatacggagattatcgctaagggtgctaagtttacccgcaaatctctggaagaattggattataactccatccaagtaagcaagtggacggcagacgctcagaagaatgagttgatcaagcaggttatcttgaattatttgaagaagtacaaggagcttgacgctgagttgagacgtaagaagttcgacttgacgatcggtgatgagctgccgacaggtatcgtacagatggctaaggtttatatcgccaagaaacgtaagattcaggtaggtgataagatggccggtcgccacggtaacaagggtatcgtatcaaagatcgttcgtcaggaggatatgccgttcttggaagacggtactccggtggatatctgcttgaacccgctgggtgtgccttctcgtatgaacttgggacagattttcgaggccgtgttgggttgggccggacgtgagttggacgttaagttcgctactccgatcttcgatggcgcgactttggatgatttgaatgaatggacagacaaggctggtattcctcgctacggtaagtcttacttgtatgatggtggtactggtgagcgtttcgaccaacctgctacggtgggtgtgacttacttcttgaagttgggccacatggttgacgataagatgcatgcccgttcaatcggtccgtactctttgattacgcaacagccgttaggtggtaaggcacagttcggtggtcaacgtttcggagagatggaggtttgggcactggaagccttcggtgccgctcatgttcttcaggaaattcttacgattaagtctgatgacgttgtaggacgttccaaggcttatgaggcgatcgtgaagggtgatccgatgccacagccgggtatccctgaatctctgaatgtattattgcacgagttgagaggacttggtttgagtttcactctggattaattcaataacaataaagaagtaggtgggctacggcccgtctactttatctattgataactctttataaataaataatatggcctttagaaaagaaaacaagataaagagtaacttttcaaaaataaccatcggtctggcatcccctgaggagatcctagagaactccagcggtgaggttttgaaaccggaaacaattaactatcgtacgtataagcctgagcgtgacggtttgttctgtgagcgtatctttggtccgatcaaggactatgagtgccattgcggtaagtacaagcgtatccgttacaaaggtattgtctgcgatcgttgtggagtggaagttacggaaaagaaagttcgtcgtgaacgtatgggacacatccatttggtggttcctgttgcccatatttggtatttccgttctttgcctaataaaatcggttacttgctaggtcttcctaccaagaaactggattccatcatctattacgaacgctacgtcgtgatccagccgggttgcgtagacacggtcggtgagttagacctattatctgaggaggaatatctggatattttggatagccttccaagagaaaatcaattgctagaggatacggatccgaataagttcatcgctaagatcggcgctgaggctgtttatgatctgttggctcgcttggacttggattctctttcttatgagttgcgtcaccgtgcgaacacggacacatctcaacagagaaagaacgaggccttgaaacgccttcaggtggttgagtcttttcgtgcgtccagaggtcgtaacaaaccggaatggatgatcatgaaggtgatcccggtgatccctcccgaactgcgtccgttggttccgttggacggtggccgtttcgctacttctgacttgaatgatttatatcgtcgtgttattatccgtaataaccgtttgaaacgattgatcgatattaaggctccggaagtgatcttacgtaatgagaaacgtatgcttcaggaggccgtggactctttgtttgacaactctcgtaaatcgagcgctgttaagacagacgccaatcgtccgttgaagtccttgtccgacagtttgaaaggtaaacaaggtcgtttccgtcagaacttgttgggtaagcgtgttgactactccgctcgttcggttattgtcgtaggtccggaattaaagatgcacgagtgcggtttgccgaagaatatggctgccgagctttataagcctttcgttatccgtaaattgatcgaacgcggtatcgtgaagacggtgaaatctgccaagaagatcgttgaccgtaaggaaccggttgtttgggatattttggagtacgtaatgaaaggtcacccggtattattgaaccgtgccccgacattgcaccgtttgggtatccaagcgttccagccgaaattgatcgagggtaaggctatccagttgcacccgttggcatgtacggcattcaacgccgacttcgacggtgaccagatggctgttcacttgccgttaggtaatgaggctgttttggaagctcaaatgttgatgttggcttcacacaatatcttgaacccagcgaatggtgctcctattaccgtaccttctcaggatatggtgcttggtttgtattatattaccaagttgcgcaagggtacacaaggcgaaggtttgactttctatggtccggaagaggctacgatcgcttacaatgagaagaagttggatatccatgctccgatccatgtttacgtggaggatttggatgagaacggcaacttggtgaagacgatggttgagacttccgttggacgtttgatggtaaacgagttcgttccgaaagagattggttatgtaaacgaggtgttgggcaagaagtctcttcgcgacatcatcggtcgggtaatcaaggcttgtggtgtggctcgtaccgctcagttcttggacgatatcaagaacttgggttactatatggcattcaagggtggtttgtccttcaacttagcggacgttctgatcccgcctgaaaaggatgagttggttcagaagggatacgatgaggttgagcagatcatggctaactataatatgggtttcattaccaacaacgagcgttataaccagattatcgatacttggacacacgttaatagtaacttgtctaatatcttgattaagcaattgacggcggataacgatggattcaactcaatctatatgatgatggattccggtgcccgtggttcgaaggagcagattcgtcagttgtccggtatgcgtggtttgatggcgaaaccgcagaagagtggtgcagaaggtggtcagattatcgagaacccgatcctttctaactttaaggaaggtttgtccgtgttggagtactttatctctactcacggtgctcgtaaaggtttggccgataccgctttgaagactgccgacgccggttacttgactcgtcgtttggttgacgtctctcacgacgtgatcgtaaacgaggaagactgtggtacattgcgtggcttggtttgtacggaattgaagaataacgaggaggtgatcgcttccttgtatgagagaatcttaggtcgtgtatctgttcacgatgtgatccatccgattacgggcgaggttatcgttcgttccggtgaggaaatccgtgaggatgccgctaaggcaatccaagactctccgatcgagagcgtcgagattcgttccgtattgacttgtgagtctaagaagggtgtctgcgctaagtgctatggacgtaacttggctacgaaccgcatggttcagaagggtgaggttgtcggtgtaatcgccgcacagtctatcggtgagccgggtacacagttgacgttgcgtacattccacgtcggtggtatcgcatccaacatcgctacagagaatagtattacatctaaatatgatggtattttagagatcgacgagcttcgtgctgttgaggcggtagacgaggtgagcggaaagaaacatttggtagtagtaagccgtttggctgaaatgcgcattgttgatccgaacacgaagattgtgttgttgactcataatataccttatggttctaagttgttcttcaacaacggtgactcaattaagaagggtgacgtgatcatcgagtgggacccgttcaatgccgtaatcgtgtcagaggtttccggtaagatcgagttcgagagtttggtagagaacgtgacttacaaggttgagagtgatgagactaccggtttgaaggagaagatcatcatcgagtctaaggataagacgaaggctccggccgctcatatcgtggatgagaatggtaattacttgaagaactactctttgccgttgggcgctcacgtcgtgaaagacaatggtgatgtagtgaaagctggtgaggttttggttaagatccctcgtgccgtaggtaaggccggtgatatcaccggtggtcttcctcgtgtaaccgagttgttcgaggctcgtaacccgtctaaccctgctgtcgtatctgagatcgacggagaggtaggattcggtaagatcaaacgtggtaaccgcgagatcaccgtaacgtctaagttgggtgaggttaagaaatatatggttcctctgtctaaacaattattggttcaggagaacgactatatccgtgcgggtatgccgctatcagacggtgctaccactccttcggatatcttggcgatcaaaggtccgacggctgtacaggaatatatcgtgaatgaggttcaggatgtataccgtctacagggtgtgaagatcaacgataagcacttcgaggttatcgttcgtcagatgatgcgtaaggtagaggtggttgatccgggagatactcgcttcttggagcagcagattgttgataagttggaggtaatggacgagaacgatcgtatctggggcaagaaagttgttaccgatccgggagattctcagacattgcaggccggacagatcgtgactgcacgtaagttgagagatgagaatagtatgttgaaacgccgtgatcttaagttggtcgaggtacgtgacgctattccggctacagccaaccagatccttcaaggtatcacacgtgccgctttgcagacgaacagctttatgtccgccgcatctttccaagagacgacgaaagtattgaacgaggctgctatcaacgggaaggtagatcgtttggaaggtttgaaagagaacgttatctgtggtcacttgattcctgccggtaccggtcagcgtgagtttgataagctgatcgtaggcgcaaaggatgagttcgatcgtatcttcgctaatcgcaagaacgtggttgatttcaatgccatggacaaagatgatgaagaataggaacgtttaataaactataaagaaaggccggcagagcaatctgtcggccttttttgttcttccttatttgcttaataaatggataaactttatttttgcgaggtaacaaagaccatagataaatactgagacatataagaaacatataataatcaatatcatgaagagaattttactttgtttaatggtggctttatttgccactggttgcttattcgctaaaaacaacgatgagaaaatgaatgtaatgtcttataacatccgttacgataattcgggtgataaggataatcaatggaaattcagaagagatttcgctgctgatttagtgaaattctatgaggcggatgtgttcggtgcgcaagaggtcttgaataatcagctgaatgatttgcttaatcgtttaccggaatacgcttatgtgggtgttggtcgtgaggatggcaagacgaaaggggagtacgctccgattttctatcgtaaggatcgtttctccgttgagaaaagcggtaatttctggttagccgaagatataaatgccattggtaagaaaggttgggacgccgcatgcgagcgcgtagctacttgggcgatcttgaaagataagaatacgggaaagaaattcttcttcttgaatacgcacttggatcatatggggaaagtggctcgtcatgaaggagcttcattggtgctggagcaagcgaagaaattatccgagaatttgcctataatcgtgactggcgatttcaatgccgtgccttctgatgagccgatacaagtattgactaatccgagtgatcctcgtcatttgactcattcccgcacgatcgcagggtttatttacggcccggaatggacattccatgattttggaaagatcccttacgacaagcgtgaatggattgattatatcttcgtgaaagggaatatcaaggtattgcgtcatggtgtattgactgaaacgttgaataacctgttcccatccgaccattgcccggtaatcagtacgttgatactcgaataaaaaagctttgtgtgtatggggaaagtagacgtattgaaggaaactaccccgctttcatcagaagattgcttcttggtcatgcaacgcccgaaatcggggtttaattttccgttacatgtacacatggagtttgagttgaactatctggagaatgccgctggcgctattcggatagttggcgattcggtcgaggaaatcgatgatctggatttggtgttgatcgcgggaggaacgaagcatgcttactcgaaccataagtgtccgtgtaatgggatctttgagataacgatacaatttcataaatcgttatttgatagcttaatcaatagacggcatttcaagaccatgaaggatatgtttgataacgcttccagtggtcttgttttcagccgggaaatgatacttggcattcaagataaattaagaatgttgtcgaacgataacaagccggattctttcaagaacctgttgcgtttggtcgagattcttaagattctatctttggataaagcagcccgtcggttgaatgccgtgaacacggtaaagaactataataataacgataccgatcgtttagatagtatcatgttatatttacacgaaaattatcaaaaacgtatcaccttgtcggaagtggctaagttaacaaatatgagcgatgcctcattgatgcgtttcttgaagaagtggacgggaaagacatttatcgataacttgaacgagatccgggtagctgaggcggtatgccgtttgaccgatacaagtgacagtatttctgaaatatgttacaggtgcggttttaataatctatcgaatttcaaccgggtattcaaacggcgtagggggagtacccctacagagtacagggagaaatattcccgttcgaggtttataatttaaaacatgatttaaagcatgtttacattgatttgtgtcaagtgttgatgatatagtattatttattgcacatatagtatttggtggtctttgctaaagcccttacttttgtaaagttcaagtgaaagagattagcacttagacaaaacaaaccttaactaaaacgccaaaaccaattatatcaaacacaaaaggtatttttacattggtctaaagaattgagaattaaaaacacaactagaaaacgactgcctgagaaggtagtcgtttttgcatttatagtcttcaacccctttgtaacccggaataaatatgtatatttgtcttcgcaatttttaatcaccataaatttaaaagaagaaagtatggaaaacaacaaacctgccaataacgagattcagatcgagttatctgaagagatggcacaaggaacttacgccaatttggctattatatctcattcaagctctgaatttatcctagattttatccgggtggttccgggagctcctaaggcacaagtcaaaagtcgcgtaatcttaactccggataacgctcaacgtttgttattcgctttgcaagacaatatcaagaaatttggggagcaacttcaagcaggaaataataataacaaaacagctaattttgaggacttcgcaggtccgacaggagaggcttaatagatttgttttcagccatagaaagagtacttttctacaagagtaggggagtactcttttattgttgggatggctcgtttacattgaaaaaccttgatgcctattcttagatgcttacaatgggcattctaaggtgttaagaatgcctgttataaacacctgagaatgcccatcgtaaagaataccctacctctctatcctaaagattagataatcccatcaatattttcttcaatacggtttgcgcggagatctcacggttcgcggcctcggggattacgatactttgcggactctctatcacgtcatcggtaacgatcatattgcgacgaaccggcaagcaatgcatgaaataagcgttattcgtaagtgccattttctctgcgtctacggtccagctacgatctgtgctgattacttgtccgtaattcggatctttataagcggaccagttctttgcgtaaatgaaatccgctccttcaaaagccttcttctgatcgtattccactttagcgttgcctacgaatctaggatcaagctcataaccttccggatgagtgataacaaactcataatctgtagcgttcatccattcggcaaagctgtttggaacggcttgcggcaatgatttcggatgaggagcccaagtcatgactaccttcggacgagctgttttcttatattcctctatcgtgatcaagtcggcgaaactttgcaacggatggcgtgtcgccgcttccatgctaaataccggccggccggaatgctcgatgaactgactcaatatcttttcgttataatcatcttctttattctcaaagcgtgcgaaagaacggaccccgatcacatcgcagtaacagcccattacaggaacagcttccagcaaatgctccggtttatcaccatccatgataacacctcgctctgtttccagcttccatgcaccttggttaacgtccaaaacgatcgtgttcatacccaagttcatggcggccttttgggtgcttaagcgggtacgtaggcttgagttgaaaaatatcatcaacaacgtcttgttttttcccagttcactaaactggaaacgatctttcttgatctcgaaagcttcattaagcgcttgtttcaagtcacctaaatcctgtacgcaagtgaaatgtctcatatctgttacaataatattttgttaaaggcaaagataatgactacttgtcaattatcctttagaaagaccaaggaattgtttaagagatcgtatccggaggtgttatgggtagtttgaaactgaaggtagaacctttcccttcctccgagttcacccaaatggtacctcccatggcggtgaccagacctttacagattgaaagtcccaatccggtacccggttcaaattcgttcaattgcaggaatcgctcgaagatgtgccctagtttgtccttcgggatgccgttgcctgtatcggacacgtaaaattgcacgctgaccggatacaacgattggtatccgaaatgaatttctcctttctccgtatatcggagggcgttagaaagtagttttttcaagataagcataagcttatgtctatccgtgtgaagagatacgtttggagaatcatccaaaattaaccgtacgttttcggatatgcggggagaggcgtattcgtatacatcgtgcatgatagcgagcggatttacatcctcatatgaccaattgatcgtattggactcgattctggacatctcgagtgtgtcattgattaattcgagcaaagccgtgttattttctttaatcatggaaatatactgttcacgcatttccggatcatcttccagtcctaacatatcggagaagccgacgatggcatttagcggagtccggatctcgtgcgtcatatttgccagaaacgtagatttcaatagggaaagatccttggatttctgatgatccgcgatagctagctcgtcgttttccttttcgataatgctacctataatgacatgtggggtgccgctttcatcaatatccatgcttttacccgatatttcatacatcttataagtcccgtcttgattcctcaggtggaaggtgacgttgtgagacgataatttctcgtcccggattttattgaacagatagaagaaatccaaactatcctcgggcttacgtacggatgataaagccctgcatataaacctgtttttatctaatagagtattggtcgtgccgtagaattgaaaacagcggttacaatgctttttgtcgcaagtggagaaacggtcgaagctgaatgagtaagcggctaatttaccgtcttccaacgcttgccgcatcaatatccggctctcgttcaattgtcccatcaatagtttattttccctgtcagtttctttttctccctgctgcgtaagccaaagcgtatacccgctaagcccctgttcatcggtatagatgggttctactttaaacgtgacgggctcttcgcatataattgcgtcaccttttcttaaagatgacttcaaggaatcggttagtacgatgttattaaatagatgttctataataaagtcatgcttatccgccaaggaaaaatgagcgaacatcgccttattcaagtctatcagatttccttccgtatcatagatagcccctcctaaaggacaggaatagaatgtatttgaaactaaagtgttgaaaatatttgaatctattactgttgacattattcgtttagatttaagtgttgttcaagaagaaagagacaggcgagttcctatattctcgtctgcccgtctccttctatgatgtatttataagtcgttaattcaggaagcgccatcggtccccgggcatgtagcttttgggtactgattccgatctccgccccgaatccgaattgggccccatcagtaaaggcggtagatacatttgcgtatacgcaagcggcatctaccaattgctggaagcgccggatagtttccggatcttcgctgattatgctttcgctatgttttgaactgtagcgggcgatatgtgatagagcctcgtctaaagaggatacggtacggatactcattttgtaatcgaggaactcggtaccgaaactgttttcgttagcctgttgtaaaagcgtctccggataatgttcggatagagcggcataagccggttcgtccgcataaatgattacgttgctgtccggaagcttttcacagatatacggaagatcagatagacgttctcggtggatgattaagcaatccaaggcattacatacgctgaccctccgtgtctttgcgttatttacgatctcacgtcccttgcctttatctccggagcgatcaaaataggtatgacagataccagcgccagtctcgatcaccggaactttcgcatgttcccggacgaagtgaatcaaggaactgcttccacgaggaatgattaagtcaaccaagccgaccgctcccagtaattccgccgtagcctctcgatccggaggtagtaaagtgcatacagccggatttataccctgacgctccaatacagaatggatgatgcgtaccaaggctcggttagagaagtccgcatccgatccaccctttagtacgcaaacattaccgcttcggaaacataaggaaaaaacatcgaaggtaacattcggacgagcctcatagatcacgccgatcaccccgaaaggcacggttacttttcggataaccattccgttcgggcggatagtctcactcaagaccttatttaatggagaaggtaatgtcgatacattctccatatcggcggcgataccttgtagcctttcctctgttaatttcagccggtcgtatttcgggttcgctgggtccatacgttccagatcttggcgattcgcggcgagtacctcctccgtatgagtccgtagaacctgcgctgtctcctttaagatcccgataatcgtttgatccgatagcgttatcaattgtttagccgcatccgatgcctgtcgcagcatatcttttacattcatactttttaatccagatatagataatcataatgtataagcggttttaaatcccgttgccctatttgcttacgtgcttcctcgctgtcataggcggtacagcctacgccgatttgcacgccttcctcattcattatctttacgatatcatctttttcgaaatcaccctcgatgcgggttactccaaccaataatacgctagtcgctttcggggcggtcaatgcctcctcggctcctttattgatatgtatttcccctttggcgaaaccctcggagtgggcgatccatttctttacgctgctgacgggtttcgaggccggaatgaaacgggtgcagaccgtgtcgctatccaccgccaataacatcggaaggatattatcctttttgccgttggcgatgataaccgcaataccttcgtccgccactttttgggcgatatgacatttcgtcaacatacctccccgtccaaaggatgatttgctagtctgtacatattccgacaaatctgttttcccacattcgatttcccggatcacggaactatccgggtccgacggatttccattgtaaatcccgtctatattactgagaatcaccaaggcatccattcccatcatcgtagcgatcaagccggataactcatcattatccgtgaacatcaactcggttacggatatcgtatcattctcatttacgatggggatcaccttgttttcaagcattacctccatgcaatgcttctggttcaggtaatgcgtacgactcccgaaattctcttttgtagtaagcacttgcccgcaagtcatgccatgctcccggaataactcgtaataccggttgatcaacttggcctgtcctaccgccgaatacagttgccgggctgatacgggatccagctttttgccggcctttatctcgcttcgtccagaagccacggcaccggaggagatcaagacgatctccataccttgccggtgcaagtccgctacttggtcaaccaatgcggacatgcgggtgatatctagcgtcccatccttgcgggtcaggacattgcttcctatttttacagcgatccttttcaagaaagttatgatttattatttattatctttatcccggatctctacccgtcggatctttccgctgattgttttcggcagttcgtccacgaattcgacaacacggggatatttgtaaggagcggtgacacgtttcacgtgattttgcaattctttgaccaaggcatcacccgctttatccttataatccttcgccaatacgatcgtggcctttactacctgtccgcggatctcgtcggggacaccggtgatagcacattccactaccgcagggtgagtcatcaaggcactttccacctcgaacggcccgatacgatagccggaactcttgatcacgtcgtccgcgcggccaacgaaccataagtaaccatcctcgtcacgccaagccacgtctcccgtgtaatacaggccatcgtgccaagcttcccgggtacgttctgcgtcccggtaatattccttgaataacccgataggcttgccatttgttgtgtggatcacgatctgtccttgctcgccatcctccgcacggcttccgtccggacgcaataaatcgacatcgtactgcgggttgggaacacccatagagcccggtttcggctccatccacgggaaagtggcgactgtcagcgtagtctctgtctggccgaagccttccatcaatttaatgccggtcaacttatagaacgtgtcgaacacggcggggttcaaggcctcgccggcgatcgtacaatattgtaaagatgataaatcgtatttagtcatatcctcacgaattaagaaacggaagatcgtaggaggagcgcaaagcgaggtgatccggtaatcctgtatcatctgcaacatatcagcaggcgtgaatttctcgtggtcgtaaacaaatacggtcgctccggcgatccattgcccatatagcttaccccaaactgccttgccccagcccgtatccgcgatcgtcaggtgaaggctgtccttatgcaagttgtgccagaaactaccggtcacgatatgccccagcggatacgtaaagtcgtgggccaccattttcgggtttccagtcgtaccggaggtgaaatacatcaaagagatatcgtcattgctatttgggtgagacgggcggacgaaaggagcggcgttttggataccctgttggaaatcctcgaaaccttccggtatttccggccctacggatacaacactttttacggtcggtgagtccggcaaagcctctatgatatgtttcgttatcacttcctctccggcgcaaacgatcatcttgatatcggcggcattcgcacgataaacgatatctttcttggtcagtaagtgtgtagccggtatcacgacagcccctaatttatgcaatgcgatgatagagaaccagaactcataacggcgtttgagtatcagcatcaccatatcgccatgtccgatccccaaggattggaaataagaagccgtctggtccgtataccgtttcaagtcggcaaacgtaaaatcaatatgctctccatgatcgtttgtccaacataacgctttcttatcaggttcttcctccgcccaagcgtctaccacatcatatccgaagttgaagttctccggaaccttgatcttgaagtttttaataaaatcttcttgcgactcaaacgtcgttttatctataaatctttctaacatgctgttgatcgtttataaaatgacggccaagaaactgaccttttccccatccagcgctttcataccgtgaggaagctctgagttaaaataaatactatcaccttcttctaagataagatctttattgttgatctgtagtaacagacgtccttttaataccatattgtattcttgccccggatgggaattgagatacatcggctcatcctctggtttgggatgtacggttaccaagaaggggtccgctttacgtccgacgaaaccggcggccaatgattggtacttataggctttcgtacgctctacggcaacaccttttccgttacgagtaataaagtacgtactcattttaggctcgtcgccaaacatcaacgtggttaattctacgccataagcctgtgagatctggtgcaatacgctaacggaaatatcaaccgtgccgctttccagcagcaaatattgctcagtcgtgaggttgcagacctttgccatttcttccggcgtaatctccagtgcgtcccgtaatccggccagacgctctgcgatttgttgtatctgttcgttcattttgctgaagttattgtattatgtcgctccaaagataggaataaaaagcaaaaagaaggtgaaagcccttgttttcttttctaattaacaggtatggataggatggttgaggattataatgaataggcgcttcatttgcttccggatggagaatggtgatttatatatatgggcgattatcattttgacattttgtaaactcaagtgccggagagtcgcatattccggacggaggtacaccttgttgctaaaaacgggaaaaaataacagcaactacttgttcccttgattattatcgaaaaaagggtgtttattctagctgaaggaattcatcctagttcatatttattagagcgcaagccttgtttttatccggatcggagcgtatttacatacggttatatcgcttcatgagactaaatgtatcgctttacgtctcctattgtatgggataacgccgctagtcgcatcactttacgccggtatccgtgtgaaaaagcaaggctttttgagtggaaaatggccttcaaacgtgctttttaccatcttctagtatctgattgagccctttttaaaaagagatgtgtcagaattattccattaatttaagcaaatagataggattacctcatcaatataatctccttcacctcatgatccttgataagggcatacatgatatgtccggcaattataagctattcggcatttttctttagccattctaaccggcgctgatccgggaggtgttttaccttgaaatgctcgaatgtcacattaaatcctttcccgtcgggacaagcggccataaacccgacttgtacggggatattgtcttgtagccaagcgttacgcataagggtgtattccttatcatcgaatgagtagaagatctccacggcgtccaatctccggacagcttttatccatacataagggatcgctttgtctaaggtgataacgctccagtcggaggtcttatgcgtaacgaccgcgcttaggttgtatttaccatccacgaactctataccggcttttatataattttcatgattgatgcgaagcatcaggccggcttggtcaaaacgctgcttgtaatcgccggttatcttgactttcacttcgaattcacccccataagtcgcataataaaaaggagcgtcatctaccgtaaacccgtaatgggaaatcctccaatagtcactttggggagtgacctgcatggaaagtgacttgtctttaatctcccattgctccggctcgttgaaccattgcatcttatctaatgattgcgccccgcaaaattgcaaagaggcgacaataacaaaactcagtaatactaattttctcattttacttcttatttcttattttgattctttctattcccgtaagaagttaatgttattaaccttacctccgcaaaggtaacgtgttattatagatcgcgcaatgattctgtgattttatctaggaaggaaaagtaagggttaatgtgttttcgtctattcgtatttgataacctcgaccgggcagctttcggcagcctctttaatacccgcctcgaaatcatcgaaattaactccttcgtttacacgtgaacgatctgtaacagtgaatacttccgggcaaatgccctcgcatgtaccgcaagcgatgcaatcctcttcaatccaaactcttttaattgccataattttattcctttaagatgattaatatgttaatgtaacaaacaactttcgcggattgttttcgggagaggtcttttagatcattgtatagaccgtgaaatgagcttatctttggttgatatatattaacgtttacacgccactgttttaaaataaatttgctacgtttacagcagaaagtttcattgaataaccatttaaaaaatctgaagtattatggataatgctatttttagatttcctaaacccattaatgagccggtaaaagcgtatgctcccggatcaagtgaaaaagcatccttaaagaaagcgttggcgcagataagttccgaggaatgggatatacctctggtaattggcggaaaagagatccgtacgggtaataccggtaaggtcgttatgcctcatgatcatcatcatgtattggctacttatcataaggcgggcgagaaagaagtacaaatggctatcgacgccgccatgaaagcgcataaggaatggtcagaacttccatgggtggaacgtgcgtctattatgcttcgtgtagctgagttgttggctacgaaatatcgttatatcctgaacgcttcggttatgttgggacagagcaagaatccgttccaagcggagatcgacgctccctgcgaattgatcgatttcttgcgtttcagtaccttctacgctagtcaagtatatgccgatcaaccctattccgagacgggtatattgaatcgtatggaataccgagccttggaaggtttcgtgttctcgctcacgccgtttaattttacgtcgatcgcttccaacctgaatatggctccggctatgatgggtaacgtggcggtatggaaaccgtctactacggcgatccattcgaactatttcttgatgaaggttttccaagaggccggcttgcccgatggcgtagtgaatttcatcccgggacagggtagcgtgatcggtaaggtgattacgggtagccgtgatttggcgggattccattttacgggctctacctctacgttcaataccttgtggcgtcagatcggagagaacttggggcattataaatcttatccgaagatcgtaggcgagacaggtggcaagaactttatcttcgctcatccttccgctccggcgttggatgtggctaccgctatcgtacgcggcgcgttcgagtatcaggggcagaagtgctcggcgggttcccgggcctatatcccggcttctctctggaaagaggtgaaagattacgtgggcgatatgctgaaagagatcaagatgggtgacgtgcaggatttcacgaactttgtcaatgccgtgatcgatgaggcttcgttcgataacatcatgagttatatcgattatgcgaaacagtctccggacgcagaggttctttttggtggtaacggggacaaatctgtaggttatttcgtggagccaacggttatccagaccacggacccgatgttcaagagcatggtagaggaaatcttcgggccggtgattacgatctacgtatatgacgacgctaaatatgaggagactttggaactttgtgatcgtacttctccgtacggattgacgggttctattttcgcccgtgatcgctatgcgatcgataaggcattcaataccttgcgctattcggccggtaatttctatatcaatgataaaccgaccggcgccgtgatcgcccagcaaccgttcggcggttcccgtgcgtccggaacgaatgacaaggccggtggcccgctgaacttgattcgttggacgaatcctcgttgtatcaaggaatgtttggttcctccgacgagctacgggtatccgttcttaggtgagaaataattgtcataattaagaaataccaactgattgtgggggagacggggcgtgccccgtctctacgctatgacgttacctttatctacatacaatatgttagactttaacaataccgagatcgctttctcgtcgaagtcgcggggagaactacaaaatgcttactggctttttaatacgataaaatatccttggttggtaaaatgcgctaaagtagccacgagtatagccttgaaaatacatttcccgctggcttgggcggtgaagcctaccttatataaacagttcgttgggggagaaactttacaagactgttccgcagccatcaaccacttgatgaaatacaacgtgaaatcgacgctcgattattcggcggagagcgagcagaccccggagggcatacaggcgactttcgaggaaaccttgcgctcgatagattttgcgaaaggaaatacgaatctggcctatgccgtattcaaaccatccacgatcacgaccgatgagttactggccaaagcttccgagaaacgggaagagcttacgatagacgatgtccggcatttccgcgagttccgcgagcgttttatggcgctttgccaacgggcttacgataacgacgtacgtattttagtggatgcggaggattattgtttccaagatgccattgatgcgttgaccgatgaggcgatgcgtaagttcaacaagaaacgtgcgatcgtattcgctaccttgcaaatgtatcgtcatgaccggatgccttatctgcgtcgtatctacgatgatgccgtggcgaaaggttatattgcgggcgtgaaattcgtgcgcggggcttatatggaagcggagcgtgcccgtgcggcggcgttggattatcccgatccgatttgtaaagataagcaggccacggacgagaattatgatgcggcggtccgtttcaccatggatcatttagatcgttttgagatgtttatgggaactcataatgaggagagtaattataagttggcgaaattgatggacgagaaggggatcgcccgcgatgactcccgtgttttctttgcgcagctattgggaatgagcgataatatttccttcaatttagcccatgcgggatataacgtaaccaaatacgtaccgtacgcctcggtaagggatgtactgccgtatttgatccggcgtgcggaagagaatacttctgtcgcggggcagaccagccgggaactccggatgttggagatggaaatgactaggcggaaagaacataaacctgccgagggcaggtaaagtagtttgtcagcatatttcggggcgtattggtgctggcaaactactttgtctgcctatttttatttactggccttcagtccccggatcacggaagaggtaaaaccggaaagttccatctcatttagacccttgatcgtgattccgcccggagttgttaccttatcgatttccatctccgggttacttttgttctcgagcaataaatcaacggcgcctttcacggtatgcaccacgatctcttgcgcttgtttcggatagaaacccaattccacgccgccttctatcgccgcgcggatataacgcaaggcgaaagcgatgccgctggaagccaatgctgttcctgcgcccatcaaccgttcttctaccaacatggcgttgccaagctcgttgaagatatggatgattagatccgtttgctccttggaggcgttgcgggcggaaacgaaagtcatgctgctcatcacctcgatagccgtgttgggcatgatccggaagatcgtgggagtagccagacaatcgaagtctgtattcttggtcaaataagtattcaacaggtcgaaagtcacgccagccgctacggatacgatgatttgtttctcgaagtcgagcaccgacttaatctcatctataatcatttctacacgccaaggtttaacggcgatgatgatgatatcagcgtttcgtgccgcttccacgttatcatgggtcaagataaagtccggatcgatctttctcatcttctccaaggtctcgtccgattgggcggtacaagtgatatcagaggctttgaacatggttcctttcgctaaacctcgggcgatcgctccaccgatattacccgaaccgataatagatattctcattttgcagataattagttatatattatgttttctgaagaggcaaacttagataaaatatctcaaatacgtacgactttgtagagttagctacggataaaaaacttacatttgcggtcgatacggacttaatactaatataaatatataaaattacatgaaaaagacaattctagtttcaagcatgctattcgctctgactatgtccgctacgatccaagcgcaagacacggagaagaaggtgagtgaggagggattcgtgttcacgaccgtgaaagagaaccccattacatctgttaagaaccaaaatcgtgcgggtacgtgctggtgctactcctcgtactctttcttggagtcggagttgcttcgtatgggaaagggcgagtatgacttatccgagatgtttacggtatataacacctatctggatcgtgccgacgctgctgtgcgtacgcatggggatgtttcgttctcgcaaggtggatctttctatgatgcgctttatggaatggaaacattcggcttggttccggaagaggagatgcgcccgggcatgatgtatgccgatacgttgagtaaccataccgagctttccgccttgacggacgctatggtggccgctatcgccaagggaaagttacgcaaattgcagtctgatgagaataacgccatgttatggaagaaggcggtcgctgcggtacatcagatctacttgggggttcctcctgagaaattcacgtataaagggaaggaatatacaccgaaatctttcttcgagtctacaggtttgaaggcttcggattatgtctcattgacttcttatacgcatcatccgttctatacccagttcccgctagagattcaggataactggcgtcacggtatgtcgtataacttgccgctggatgagtttatggaggtctttgataatgcgattaatacgggttatacgatcgcttggggttccgatgtgagcgaatctggttttactcgtgacggagtggccgttatgcctgatgatgagaaggtacaggagttgagcggttccgatatggctcattggttgaaattgaaaccggaggaaaagaagctgaacacaaaaccgcaacctcagaaatggtgtacccaagcagagcgtcagttggcttacgataattacgagacgacagacgaccatggtatgcagatctacggtatcgccaaggatcaagaggggaacgagtattatatggtaaagaactcttggggaaccaacagcaagtataacggtatttggtatgcttccaaggcgtttgtccgttataagaccatgaatatcgtggttcataaagatgccttgcctaaagcgatcaaagccaagttaggtatcaaataaccgatctgccaaggagggttcaaataaaaactaaaccccgatagcttccggcgatccggtaagtctatcggggtgatctatatatacaaagatgtgctgcctataaatttattggacaagtcttagcgtgtagttaagatctgccgccgctttttgcaacgcgtcgttcatcaaggtcaagttatccccttctactaggaaatagatgacgggttcgccatcactgggaatcaactcgtagattactgcgctagcgtcatcgggagttccgtgctttactttttgtttaccggttgtaatggctttctgaggagctttcttcgccgctccggtacttgaggctactgcttccggtacggtataaagagcatccaactcgaatacgccttcctcgtctgcgttatcttgttgataatacaaggttaagtcataatctacgttcacgctatccggagaagtcagggttcccttatactttttttggataaccggtccctttttaggatcagccttcaaggaatccctcatattcacgggctttgccggttgggtcgccttaacagaatggatcagtggcaaagacggagcgtccggagccgccgacattatggcgaattcttcttcctctacttctacgggtacatccttttgggcttgcttcccgctacatgcggccaaaaatgccatagccgctactgcgataaaatactttttcattaccattatttattttattagtgacgtttggacatataacataaaatcccccacgatttgtttcgtgagggatcatttttaactatttaccgtgaaatatttatttcttggaaggctctacccagtcatccggatagggagcggtcgggatcgtggaagcgcttccgtctcgtccggcgaaatagtgcggtgacatgatctctacgccagcctcattgaatacgtcctgtatgttttgatgcaggtcggaatagatatctccgagtttatcggcgtcctttatataagcgttgatttgataacagggatagtaatcgcttagttcggtctccaatacgaaaggcttcggctctggcaataccccggtggtctggcgggcggcattgatcaataattgatgaacttgccgccaaggtacgtcgtagccgatcgtaaccgtgctgtggatgattaatccgtattgccgtgcggatacgctataatttgttgtatgggaggacatgataaaggagttcgggatggtcactacctcattcttaggggtacgtaaacgggttacaaacggagtcttctcgatcacgttgccagtcgtctcgtttagttggatacggtcacccaatttaaagggcctcatataagtaatgaccagccctgcgatgatatttccgatcaccgtactggaacccaacgatatgatcaaaccgacaaatacggatatgccttgaaatacccccgagtccgatcccggcagataaggatagatcatggcgatcataaaggcgtatagcaggaaacggatgatattaaacgtcggttgcgcccaatccgggtaaaaacctgatattttcaggttctcgctctctatctcgttggctatgtattggattccttttacgatgtatttgatgcagtaatagatcaccaagatgataaacaagttcggaatataggaggctaccgatttaaagatcatctttaccggctccaacaaataggagaatatcttcaaggctagatcttctgtttgcgggaagatagcgaaaaggatcggtacactgatggttaattggattagtaacacgatccatcgtattacgttggtgaaaaacatcaatacacgtccttggcgatgtgtgttgagaaattcataatcccggatggtaatagatctgagtcggttctgctttaaccagataattttcctgcgtagcttcttaaacagatagttggtcagcttaaacaggaaatattggatgataattacgaggatgaacaataatacccgtttcgctatctgcaagatactatgttgctcccttaactcttgtatcttgttttggataatcggttgatattgttcagcgagggctatacgactgagattttgccatagggcatcttgatcggtgatacttaggataaccttgtctccgtacatgatatccgttacgtattcgctgtcatagatatagatggaatccttcttcaaggaatgcgaggtcccgatctttaccatgatattgaggatgtcctcagcccggtcaaccggggtgcggcctccgcgcttggcgtaaaggtgaaataaggtatccccctccacgactacaggtacgccgggagtcagtgcccgaagggaatcgatacggtttcgttgctcggacctttttagggagtcggcggtagcgttgctgtttttcgtgctttccagctcgtctttcagtaagatctcgtttagtttcatctcttgcaactggagggctagctcctgcatcttgatggaatccttccggtgctgctcatcgagcgaaagcgtatcggttggggtaactggttcctccggatcattgcctaatgtcgtagacaatagttcttcggccttttcccttaattgggcgttggacaccgttggcaggaaactgattcctgccaagatcactaatcgcaataaaaattgtttcatcgaatcgtggattaactatttaccaccggccggaagatgttccagccagtatttagccattgtcttacgtaggtgaagagttgttccttccctttcgttgatgctatggctacgcatcgggtaactgatttgcgtaaacatctttccgttcttgatcaacttgttcaccagcatctcgcaattttggtaatgcacgttatcatctcccgtaccatgaataagcagcagattaccttccagtccctcggcataggtaatcggggaacctttgtggtagccttccggattgttctgcggagtattcatgtaacgttcttggtagatcgtgtcgtataaacgttggtcggctacaaaagcgatcgctataccagtatggaatattttcggataacggaacatgcagtttaaggtctggctaccaccaccgctccatccggtaataccgatcctgttggcatcgataaacggatattgacgggtcatatccagaatacccctgctctggtcttcggaagcgaaagtacccacttccccgtaaatacatttccgccattcacgtccacggggagtattcgcaccccggttctcgatacttaccacgatataaccttggttcgccatatattgttgccataaatctccgttaccccatacatcttgtacggtggcgctcgccggctcgccgtatacctctatgataaccgggtatttcttggatgcgtcgaaatcgacaggttttatcatccatgcgtccaaggttagattgccggacttgaccttgataaattctttcgggtttaatcctaaggcggcgtattggtccttggcttgggcattatcctcaagcatgcgtacggattgatgtttcgggaaagaaaccatgtcgataacggatggggtagaggcgttactatacgtatgtatggcccatttgccggtgggtgacatattgtagcggtgctgtccggattgttccatggggcttacacgctccacttccccattgccgaatgctttagcccggtacaagtaacgttgggtgaaattgtccggggaggcgatgaaatagacccagcccttttgtagatcggtcccgaccggcgagatataatcaaaatcacctttggtgatgggttgtatctcttttccgttccggcttatccggtataagtgtcgccagccactacgctcgctttcccatgtgaaatagcggttgtcctttaaccattgtatgttatcattcgtgtccagccatgcggcatccgtatcagtgaagatattattcagcgagttatcggatatcttggcgatccataccttatttgtattctgcgggcggtttagttgctgtatgaacaactcgtcgctttcggggatgaattccatacggggcaggtagttgttccggggatctccgggtatggcgatccaagtggtgttcccgccggtagaggaaacgtagcctacttttacggctgaattggtggttcctgccttggggtatgggaaatggattacctttgcgtagatggagtctacattattaataatgtcgaacactcccgttcctttcgtatcgctttgccaataggcgatatgctttccgtccgggctccagcggaaaccatcccggcaactgaactcctcctcatatacccaatcgaaagttccgttgacaatcgtatcgcttccgtcttttgttagctgcgtgattttcccggagtctatatcttctacatatatattattgttggaaacataggccacacgtgtgccatccggagagaatttagcgaacatcatggaggattccggcattccttttcccaattgacgtaaagcgccgtcctttaggtttaatacccaatagtcaccccgggtatcataacgccatacccgttgggtattgttataaatcaagactttcttattatccgcactccaagagatactacgtgcgggaataggctttcctgtagatttgtctgtcaatagggatgaggggataatgacttcacgggagttatcttttgcttgataggcgacgatatccgtgcctccggtttgcttattattttccaagcggctataacgttcaccgtcttttagccaagtcatgcttccgatgccttttgtttgtatgacgttaccggcaacgatatcctcaagattcaacgctttttgtgccatgcttatacctcccgacagaaggctgatcgtggcgatcgctattaatttatttagtttcatgttgtattagttggttactactatatttatgcaaagaacggaaagttagttgatataacaaaatggatttgtatattcgcgcctcggaaatcaagaataattataatttaattttatatagaaatcggaatgaaagcactttcaatgtatgtatggtcacttttagtgatcatgatgatgggacttacttcttgtggggatgatgatgagcttcaattctcggaagaacaattggcttatatcaacaaaaacaaggaatacatctgggaaaagaaaacagagaaagatgagatgggtgaattaagatataagcaagttgttctagggggtgataccgccttataccggatcattcggaaagaaaatgagtggacaacaacacccacgatgacttccgtggtctatttgctaggtctggaagggaagtttatagatggacaggtctttcaaaagaaactggatagatcaagtttttctatgaacggcattatcccgggcttaagcggtgtcttattgaatatccatctggatgagaccgtggaggcgattatcccggcttcgctaggttatggatatggagattatagcggtatccccggaggttctactttaatctttacttttaccttggataaggtcgaatgaatattatcagactaaaggcacatttggtttgatctgacttttatctttataagatttggcacggttacttaattccgccaacgggttaatagtataagtaggtgtggtgtaattgctttattttgaatatgtatacgatttattcgtaaatattcgatagtttcgttgcttatctccttttttctttttaatttggcggattataaacataatcttgatattatgaagactgccattgttcctttcttgttgcttctgaatgttcttgtcgctgtaaatgcacagactaaggattctgttatcttggtgaaagatagtattacggtaaaattgccggatgtctacgttacttccgagcgtcctttggttacggttacggacgatgccttatctttcgacgtgcctaacttgatcatggccaaaccggtgaatactgcatttgatattttaggagagattcccggattggtgaaagaaggggacaacgttagtatcatcggcgtccctgctacgaacattattattaacggacgtagaagctcaatgtcattgtcccagattgtagagcttctgaaatctacctcggccagcaaagtaaagagtatagagcttttgtatagctctcctccaaaatatggcgtaaaaggaggtagtataaatatcattatggagaagaaagtgaatgaggatttaagtgccgatatctctttgaccggaaagcaagctttctacttctcgccaaccggattagtgaatttatcctactccaaaaagaaatatagtctggatctatcttattccgctcgatataaccattccctttcaaccgaggatatgaacgcctatcccatcgtgaaggatcgtccttatgagatcctgcaagaaaatacggcggtaggtcgttctatgaaccatacgattggggcgagtgccagttggtttatggataaggggcgtaaggtggatatttcttattatgccaagataacggattctaattccaaacgatattcgaacactttatttgtgggtattgagaatgcggaaagtaataataagttatcgggcccgaagaatcttcaaaatgtacggttgaattatgcacattccaagaacttgaacgcaggggtggattatacctattataaggatcgcagggatcaatatatgatctcggattatcccgatacgaaacaagaggtggaggctacctcccggcaaaatatccatttggcgaatgtattcgttaactacgaacgggtatttggaaaaggatggaaaattaacgtaggcacgaatgtgcagttatcctttacggataatagctccattacctaccaagataaacaggaggatctgtcagctacgtttgcccaaaaagaaaaagagtatacggcgggattgtatgccggtttctctaagcgttttggcaagaaactggtgttgagcgcttctctttcggcggagtataataaggcggtgattgattcggcgggccggaaatgggccttatggtctggggcaaatctctatccacaattgaacttgagttatacgattgatccatcgaatatgcttcaagtcaatttttccagcgataagaagtatccggcgtattgggccatgagctcgaatgtttcttatttgaatgtgtatagtcaggtacggggaaatccttatttggaaccggaacgtatttatatggctagggctaattatatcttgaaaaagaaatatgtttttggactattcgccaatcatcatgtgaattatattcgccaattgtattatcaagatacgaaagcgttgagagcctattaccaatcggttaatttcgataagcataatactttcggggcgatggcagttatcccgtttcggatcggtggggtggttagctcacggttcgtggcatcgggcttcttgattcaagaagagggagtgtttatcgatatttcgtttgatcggaaaaagttattcgggcagttgatgttgttcaatacgtttactttatcaaagaagaagaacttatcgctggaagttaacgctcgctatagtgcgccttcggtacaaggtatctatgatgtggatggtaattataatgtatcggcagggcttatctggaatccgataccgaaaaagttaagtgtaatgctgcgaggtgaggatttgttaaagggcttacgtgcgaaaacgcatattgattatcccagccagaagagtgatatgacgatctattcggatactcgttcagtatcgctcactttaaagtatacattgggcaagatgaaccggaagaataagaaagagatcgattcttcacggtttggtcaataatgttcttatggaatccattcgataacgcctgtgactggatgttgttttttccagtcctctaattctgcatacgtacgcacgccgtcttgaatgactgcttggtaatattccacgcccatgattttcgctgtatccggtgtctcatatttcagttttaagatggcctgtcgagtctcgtcagtcagtacggcggttatacgttcggccattttctcgaaataaccgtcataacgggaaccttttacgatatggatcatatcaatttgccagagttcgttattcggatcttggaaccatgcgtgccattctacacatcgttcttccgtatcgagcgagtttccgtattcgattcgtttaatgagcgggttctccgctagccgggccatcgcttggaagctgtcggatatacggaagggagaggtgtaaatatggaagtcgatatccttatgtttcatgagtagtcccatatttaaggagcctactaagtttatttccgccccgacagatttccagatatttataatgtcggtttgccggatcacttcccaagctctttcttggtttcttttcgctaattctaatagatgttccatgatttaaataatttgggatgcgaagttaaaaaacgaaatggaataaggaaatagctatttatagctaggttgatatattatataggtgtactattttcagttgtagagacggagcgtgtcccgtctctacaagttgtacaatatatatttatcttttggataacctgaataactcaccgatccataaaactagagaggaagatccgataataatcacccaatctctcaaggacaaaggtattacgctaaacatctcgcctccaaaagtgacgatcaggtattgaccgatcaaaatcagtaatgcaactagcaagaaacttttactatcctttaaattggcgaaagcggaacgtccttccataaaagccttcgcgttaaacatattccagaactgtagcatcacgaagaagctgaagaaccatgataagtcgtgtggcgttaagccgtcttgcgcatggaaatagaacaacaagcccatcaagattacgacaaatgcgaatccgacaccgaaaatattgtaagccatcgggcgagtgataatgaaatctccatccttaccgctccggcgaggtttatctttcatcactcgttcattcggtgggagagaggccaatgctccggctgcgaatgtatccatgatcaagtttacccataacatctgcgtgatggtcaaaggtgattccgtacctaataaggaacctaataatacgatcagacaagcggcaacattgatggtcaattggaataacaggaatttctggatattccggtacaaggaacgtccccacatcaccgcacgggtaatgctactgaacgagttatcgataatcgtgatgtcgctggcttccttggcgacggaagtaccgtctcccatggagaggccgacttgagcagctttcaaggctggggcatcgtttgtcccgtcgccggtaaccgctaccacagcgcctttttgctgtaataattgtaccaaacgctgtttgtccgtaggacgggcacgacacatgatcttcaagtctaagacacgctccaaggcctcttggtcgctaagcgcctcgaatgcgggacctgttataatgttcctgtcgctatcatccgttttccacgtaccgatctgccgtccgatttctttggccgtacccggtgtatctcccgtaacgatcttcacgttgatacctgcgttcaagcaactttgaacagcgggcggcacgtccgcacgtaccggatcggagatcgctacaatacctaaatacgttaaatccgtatcatgcaaacgaccctccacgaagaaagtctcatcctttccatcctcgataatttggtaagcgaagccaagcgtacgcatcgcttggttctggtaatccaataattgtttttcgatgccggctttacattccgccaccggtttgcaagttccgtctatcgccacccggttacttttggccagtacgatttcgggagcacctttcacgtaaagtaccttcttgccgagtaacggtgattgtacgattgtagccatatatttccgttccgtagagaaggtcaattgatctaggatcgtagcgttctctcttaattccagataattttggtgttgtccgttcaaccagagtaaaagggcggcctccgtcgggtttccaagggtttttaccttttcttccgagaaatcgaggaatgccgtggagttcgtggagataccttctttgatcaggttacttaactcatcctccccaagcttttgttctttcaggttgtagaaattcgtttggtagacttgcatttgattctgtgtcaacgttccggttttgtccgtacaaattacggtagttgctcccatggtctcgcaggcatgcattttgcggacaagattattcgtcttcaacatacggttcatgctgagggccaaacttagcgtgacactcatcggtaatccttccggaacggataccacgatcaacgtaaccgctaccataaagtagttgaggatatgggcgatgatgtccatcgccggcatcccggggaagctatccgataaaaggaattttacggtcaaggcgatgaacgtcactccggcgatcgtatatccggctttgctgatcactccggccaaacctttcaattggatctgtaagggagtctctacatcgctctcgatttgcgagccttcgtagaccttaccgtatccggtagcatcacccactttttccacttgcatgacgccatgtccgtccacgaccgtcgttcctcgcatgactacattggacggataagtcgcttccgtatcgaaatccgcctcgtttgttgtcttgctaataatcggttcaccggttagtgtggattcgttgatctgtagggaaatggcttcaagcaaatgtccatctgcgggaatttcctcacctgtctccaaaacaacgatatcgcctacgacgacctcttttttcggtatttggcagatattcccgtcacggattaccttcactaaaatatcatcattgactgtattcaagatatcgaatgccttgttcgctttcacctcgaagaaaaagcccacgcaactggcaagcatgatagcgaagaaaatgccgatcggctccaagaaggccgtaaaacctttcgcctcaggtccccagcaatgtacgccagcgattatcatggacaagagccatgccactaataatatacgaataataggatcttcgaatttctccaagaattggctccataacgaagctttctggggcggggtaagtacattctcgccgtgaaggcgcctgctctcttctacttcttgtttggttaatcctcggtactgatgttttttctccataaatttattaatctgattaagaaaataggatagcaaattacgtaaagttatacgacatatacaagggtttaacctttttgcatatatttgtgttgtataacgaattaatttttaattaaaagatgaagaaagtactattcatgttattggttatgttcgctttgagcgcctgccaatcaaaggattcatatgtgaaggagtttagtgattttgtagataaggtggaaatggaggccgctgattataccgataaggactggaagaaggcggatctgaaattctcggatctatccacgaatctttacgccaagttcgaggaagagttaaacgctgatgagaaagcggagatcattaaattgcaagcgacatacgccggattgaaaatgaaagcgggcgtgaaagacgctgccaagaaagtggataagttcttggatggtttgaaggaaggaacaaaataacctctaatacgaaaataagatgaacagaaattgggtgtattcgctatttgctttatggatcgtctgctcgttcgcttgtacgcagcctaaacctgtggcgaatgtggaagttcagaaagagaatttcgtattctctataaaagggacagatacattgtccttggacaagtatgagttgccttctatatcgcccgcctcaaaaaagcctgtgatgatttttgcttttggcggtgggtttaaagggggagataaggcggataaaggatatattccctatttcgagttcctcgcccgaaacggatttgtggtcgtttctacggattatcgtaccaccttgaagaatctggatccttctaaagtctcttctccgatggactttatcgcggccttgcagcatgcgatcgatacggcggtagaggatttttatgatgctaccggttttgtgatcaaccaaagctcggattggaacatcgatgtggagcagatcgtagcgagcggttcgagtgccggggcgattacggtattgcaggcagagtatgatttatgtaacggacatgagttggcgaaaaggctaccggcaggtttcaactatgccggtgtgatctcatatgccggtgcggtctctggtgtgcttcctccacattgggaaaagatgccttgtccgattatgctattccatggcgatgcggataaaaccgttccttttgaacaagccgctatggagaacctcggcggtttatggggatcatccgctgtagcgaaaagtctggaaaatcttcaagcttcctattatttttataaggtggagaatgcggggcatgagatctctgggctccctatgtcccggaaccaatacgatatcatgagcttcttgagccgtcaagtcttaggcgatgagaatttagcgatcacgacagacgaacgtgttcccggtgatacgatcgtacggaaagattttaccgtacaggattatatcttggataatttgcgttaatatgataatgaaatataaacagccttaatttgacctttttagattaaactattcacccgaaggattgtctttactatatagagtgattaatagtgtgtttagtttattaaggttatgagattaacaaggttagttggatttttagggattgtccttttttgtgcagggcaatccctttttgctcaaagtaagcaagagcggaaggagcaaaaagagagagtagtgagggagatcgtggatagcggtcgtattaagatcgatgtggatcgtgccgtaccgatggccgggagatccgtcaatcttacttccccctactcattggaaatacatggtgactcgatcctgtcttatcttccttactttggacgtgcttactctgctccttatggtggtggagagggcttgacgtttaaagaagtggcgacagagaaggagcaaacctctgaaaagaaaggtagttccgaaatcaagttccgtgtaaagaccaaagaggatgtatacatgtttcgggtggaagtctatccgaatggctcggtgacaatcaatgtgacacccgtgaataaacaggctattaccttttatggtgatgtcgccttagacttgaaatagtcgtccttgccgtgtatctctttcctcgatccgcttatttaccttagcggtaaattcgaaattctttaaaccccaatccggtgcgatcagtagctctttgggggattgtgatacgaacctctctactacgatagaggggttcagtcgttctatgaagtcaatcactaattcgatatattcatcagccgtatataaatggaaatcagaaggatcttccttgaactctttctccatgcgggtattcttgattagctgcaattggtgcagtttaagtgtcgtgatcgggaggcgtgataagacatccgcatggtgtaatgtttcatccctactttctcccggtagtccgagtatcaggtgtgccccggtgtaaataccttttgccgccgtacgacggatagcggattccgattcttcatgggtatgccctctgtttatgcggactaaggtcttatcaagcgtactttccaatccatattcaatcatgacgaattttcgctgggaaagctccgcaaaataatccaataaaccttccggcatacagtccggacgagtgccgacaatcaatccttctactccgggataggcaagcgcttcctcatatttgagaataagagagtctaatcggtcgtatgtattcgtgtaggcttggaagtaggccagataccgcatatccggatatttgcgggaaaaaaaacgtacgccttcctctaattgctcggtaacgcttttctccgtatgacagtattctggactgaatgtttggttattacaataggtgcaaccgccccatcctttagacccgtctcggttcgggcaggtaaagcctgcgtttatggaaatcttctgaaccttgaatttgaatagatcccgtagaaaatccccaaattcataatatcgtttagtttttttcataagacaaagatacgatttctcgcaatttgaatcacttttttatgctaacttcgcgtttcaatctgaaataaagagtataaatgaaacgattaggttttagtttattgctttcgttggccgtattcggaagtgtggccgcacaaaccggaagcaagcatgttgacttaaaagaaataaccgatgggaaatttcgtcaagtgacggctatcggagagatgcgatccctgccggatggagaacactacacagccatgaacgccgataagagtatgatcattaaatattcctatcgtacgggaaatcctgtggatacattgtttaatgcccgtaaagctcgtgaatgtacctttacggattttgatggatatacaatcagcagcaccgggcatcatatcttggtttggagggatacggagtctatttatcgtcgctctaccaaggctgtggtttatgattatgacgtacgtcgtaattatgtgaagcctatttccgatgccaagggtaagcaaatgatcccgacattctcgccggatggtcgtatgtgcgcttatgtacgggataataatatttggatacgtaagtttgattttgataccgaggtacaagttaccaaggacggtgagttgaataagatattgaatggtatcacggattgggtgtatgaggaagaattcgcggtgacaaatctaatggcgtggtctcccgatagcgagtatctggcctttgtccgttttgacgagtccgaggtgcccgaatattctatgcagatgtatggtgagggactttatccggggtattacgaatataaatatccgaaggccgggcagaagaattcaaaggtctccgtacattcttatagcgtagtcaccaaagacacgaaagagatgaaggtcccggtagaaggcgacttctatattccccgcattactttcacgcagaatccggatcagttggctatcatgacattgaaccgccagcagaatgtattcaatatgtattatgcaaatccgaagagcggtgtgttccgtttgatcttgcgtgaggaaaataaatgctacgtggattctgattggttgacttccatccagttcttgaacaatgggtttacctatgtgagcgaacaagatggctattcccatatttatttgtattccccgacaggtgttatgcaacgtcaggtaactcaagggaactgggatgtcacgaagttcttgggcgtggatgagaatacgaagactttctattacgagtctgccgaggaaagcccgatccgccgctctatctataagatcgacgcgaaaggcgtgaagacaaaactctccacggaagagggtatgaacaaggcggtctttagtgacaatttcgcttatttcgtgaatacctattccaacgcgaataccccggcgaagattacagtgaatgagacgaagaccaaaaaggaactacgtgtcctgcaagataacgctgcgttgaagagtaaactgaaggaatatgcttttgccaagaaggagttcatgaaggtacatacggcctcggactatgagttcaacgcttggatcgtaaaacccgctgattttgacccgtcgaagaaatatccggtgatgatgacgcaatatagtggccctaactcccagcaagtattggatcaatacggtttcgattgggagcaatatctggcctcaaatggtattatcgtggtatgtgtggatggtcgtggaaccggtgcccgtggtgaggcattccgtaaatgtacttatttgagaatgggcgagctggaatccagagaccaagtggaggctgcgcaagcgttaggcaagttaccttatatcgataaggatcgtatcgcgatctggggttggagtttcggaggttataacacgttgatggccttgagtaccggaaacggaacgtttaaggtgggtatcgctgtagctcctccgacggactggaaatattatgactccgtttatacggagcgtttcatgcgtaccccgcaagagaatttcgagggctatgcggctacctctccgttacgccgggtgaaagacttacaaggcaagttattgctggttcatggaaccgccgatgataatgttcattttatgcaaacaatggaatatgccgaggctttggttcaagccaataagcagttcgatatgcatgtttataaagatcggaatcatagcatatatggtggtaatacccgttaccatttgtatacgaagatggctaattatttattcaataatttgtaagacatggcgcagcatttaagaaagccggattggttgaagatccggcttggcggaaatgagcaattcacgaagacaaaaagtattgttgaatctcattgccttcacacaatatgcacaagtggtaaatgcccgaatatgggtgaatgttggagccggggaacagctacattcatgatcggtggtgagatctgtactcgctcttgtcgtttttgtaatacgctaacgggtaaacctcttccgttggacccgaaagagcctgcgaatgtagcggagagcatccgtttaatgaatctcaagcatgcggtgatcacgtccgttgatcgtgatgacttaccagacttaggcgcttctcattgggtaaatacgatccgtacgatcaaagaggtgaatcctcaaacgaccgtggaagtcttaatcccggattttcaaggacgattggatctggttgatcaggtcgtggatgcggcgcctgagattatctcccataatatggagactgtacgccgtatcagtccgcaagtgcgtagcgccgctaagtatgacgtgagcttatccgttttgcgacgaatcgctgagcggggtgtggtagccaagactggtatcatggtcggactgggggagactgaggatgaggtgcttgaattaatggatgatgttttgcaggcgggtgtttctgttttgacaatcgggcagtatttacagccctctcgcaagaatattcccgtctctgaatatgtgactcctgaacgctttgaatattatagacaacaggccgttaacaaaggttttaagaaagtagagagcgctccgctggtgcgctcgtcgtaccatgcggaaaagcatatatgattcatgaacttttgacaatctttgttgttattaatataaaagtggactaaagggggggaaggaatgaacagagtaaagaaaggtctagataatcaggcgataggtttattgccgttgttgttgttcatgtttttggacaattatttttcttatttattatcctttataattggggttactttctgttttgtttgtatttttttgtttcaagtgttgagtaaggataaggtgtaccaatttatgcttctgccatcggcgggcacattggtcttatattccgtatttctttgtctcaagcttgaacctgtgttgtttatatactctcctcttatcacggaagtattactggtcgtggcgttagcgatcgtggggttcacgaggagaacggtcatacaacgtatacgcgattcgaaacgtccctcttttaaacgtactttgcttcgtactaccttgaacgaattttatttcctcgctcagttggtacagaacctgtacacgttgcatcttttcatcatcttgttatatagcatcttgccggaaacgatgcagaatatgcgtaccgaacgtttcttataccgggagttgggattggtaatcggtgttttggtcattgtttatgagcaaatacgtttgtccttgatgcaaggtagcttgaaaaaggaaatgtgggttcccgtattgaatgacaatgggaaggtgatcggttgtatcgcacgttcggtcagccgctctttaccgaagaaatactatcatccgatcgtgcgtatcgccgttgtttataatggtatgttatatctggtgagacgaagtaaggatgagtttgtctctccggatacgatggattatccgttccataattacgtgctcttccgacatagtatagatagcacggtcaaagagactctcggaagtttggcgcaagataaatcaattgctccacgcttcctgatccgttatacatttgagaacgagaaggtgaaacatttggtatctctctatgttatttgtttacgtacggaagagcaattaaatcaatgtaagcgccgtagcggaaagctttggacagcgaaacaaatcgaggagaacttgagttccggggtatttagcgaatattttgagaaagagttcgcttatttgcaaaatacgattcttttcgccgagagtttctgttgcggtaactaatcatcttataatgcccgattccctagctctataacttccaaatctttgatatcctttccctcaataacgaaacgtaataaggtacgtacttgatgaaagccactttttccagccgctcccggattcatatgcagacacttcaagcttcgatcgaatactactttcaggatatgcgaatgtccggagatgaatagatttggccgtgtatcgtataattctttgcggatctcgggattgtagcggcccggataacctccgatatgagtcatcataacgttcacgtcttctaccttgaaatgagctactttaggatattgcaggcgaatggcttgtccgtctatatttccgtatacggctttgaaaggtttcaaagcctcgaatttcgcggccaaaagatcggagcctatatcgcccgcatgccagatttcatcgcaatctttaaaatattcggcgtacttatcatcccagtacgcatgggtgtctgaaagcaatccaactttaatcataacaatttcttttattgctcgaaagtatctatatttacacgcctaagataagaatattatggagaattcatatcaatattttaaacgggacttaagctggttgtcgtttaactaccgtgtcttgctggaagcggaagatgatacgctgcctatttatgagcgtattaagttcctttctatctattcctcgaatctggaagaattttatgagatccgggttgcggaacatcggggggtaatcatgaaaaagaattattcggaggagagcgcagctgaggcggaagagaccttggcggctatcacccgggaggttaaccgccagcaacgggactattaccgtattttctcggaaaagatattgccggaattgaatcgccagaatgtttacttataccagaatgagaagccggaacctttccatgaagagtttgtccataatttctttaatgaggaggttttcccattcctgtcgccggtcatgattcaagccggtgatatacgtacgttcatccgggatcgtcggctttaccttgtgatccgtatgattaagcggagcaagcggatgaatgagccgggcttcgtacccgagtatcattatgcgttgatgaagattccttatgcgaaagttccccgttttatcgagttgcctccgcatgacgggaaatattatatcatgtttatcgacgacattatccgtgcgaatttacagaatgtttttcccggttatattattgatggctgttatagtatcaagatttcccgggatgcggatatttatttggatgatgagagccgggcgaatatcgtggagaatatccgtaagaaggtgaagaagcgcaagatcggagccttgagccgttttatgtatgatcaagcgatgccgggtgattttctggcttttgtttgcgatgcctttggtattacgtcggaggacttggtgttaggtggacgatataataatttgcaggacttgatgaaattgccgaatccggcaggaaagcatttggagcagcagccaccggtgcctatgcgtgtgcctttcctcgatgagatggggtcggtattcaaggccgtgaagaagcgggatatcttattgcatttcccttatgagtcattcgattatttgatccgctttttgatggaggcggcctttgatccgaaggtggatgagatcaagattacccagtaccgggtggctgagaattcggccgtgattaatacgctggtcagcgctgcccagaatggtaagaaagtgacggtatttgtggaattgaaagcccgtttcgacgaggagaataatatgagtacggcagagcgtatggagcaggccggtattcgtatcatttatagtattccgggcttgaaagtacatgcgaaggttgcggtcattcttcggaaggatacgtccgagggacttaaacggcgtgatttcgcctatttgagtaccggtaatttcaatgagaagacggctaagatctattcggatatggcgctgttgacttcgaatacggagattattacggatatcaataaagtattcgctgttttggaagggcgtatgaaagaacctactttccgccatttgttggtggcccgtttcaatatggtctcggaattgactggtaggattcggcgggagatcgagcatgtgcgggaaggccgaaaaggacggatcatattaaagatgaacggactgcatgaccaacatatgatcgaggaactctatcatgcgagtgaggcgggggtagagatcgatctgattgttcgggggatttgttgcctggtaccgaaccaaccttatagcgcaaacatccgggttactcgtatcgtggatatgtttttggagcattcacgggtttggtattttctgaatgatggtcaggaggatcttttccttacctcggctgattggatgcgtcggaatttgaaccgacggatcgagacggctttcccgatcctcgatccggatctgaagagggagataatcgatatcttgaatatccagctaagtgacaacgtgaaagcttgttatttggatggcgagttacgtaataattttaagtgtgatgataatccggtaaaagtgcgttcgcaattggctatctatgattatttgagaaataaatccatacggtaaccgggatgggggagttttggggatttgttgattggggggctggttgcttagccttgatcgtggcggtggtatttagctttttgttgggagtacgtacgggacgtatccgggagagaaatgaatctgtccgttctcgcattcggcagaataaagcgaatatgtatcgctataaacaacaattagcctcctatcaagagcaagtcgtacgcttggagcgggaacgggattctctggtcatccgctcggaggcttatgaccggatcgagacggagctgacggcctatcgccagaagatggagcagttggagagagagatccttgttctttccggcgataataacttattggacaatgctaccggaaaagtagatgtggatgtacctaagcttttatgtgcccttaaagatgatcctctccatgtgaatccaagtaaagaggaatgggctgagattattggtatgaccgatcttctgtttaataacttcttaaccgatctgagaaataaatacagtattacctgccatgagcaggaaatatgttgcttgatcaaatggaatttctcccgaaaggagcaactagccgtgtttaataatactccggatgcgttaaccaaatcgaaaggccgtttaaaaaaacgtctaggcttggatgaaaagacggatttggatgcctatgtccgtttattataaagcttaaagttattttgtttgtcgtgattgtccggcaatattatccgtttatctcccattgcgtggtttatatgtgtgattattagttgtttgatgttcgcttgttttgtccggtaccatttctttcctctttacgatccttcctgtacttttgcggtgtgtgatttaatttttaagaacgaataatcaggaatgctatgagaacacaaactgtactactatggatctgccttagcctaatggtggggctttccgcttgtgattggatttcgtcctctccggtggcctcgctacggcgggctaccggatggcctttcgaggtggtggttgtaatggatcgagacgcatggaatggtgaggtgggggagttgctgcaagaacaattgcgagcgccgatacctgctttgcctcaagcggaagcatctatgcgtgtcacctattcggagccatcgggcttttccggtttattacgatacgtacgaaatatcttgatcgtatccgtagatcctaatcggtatacgaaagctggaacaagagagagtcccgatgaatgggccagcggtcagaatgttgtgactctgtatgctccgactaccgctgctttaaccgagttccttttattaaatgaaggacggttggtcaaccatttcaatcgagtggaaagggaacgttggatagttggactttctaagagccatagcagttggatcaatgagaagttgaagtcccgtttcggtatctcgctgttcgtgccggaagatatgtcggcctataaggaagagaccgatttcttttggggctcgaataacgcaaatcggggacggactgatatcttggtatatagttttccctatacggctcaagaggcatttaccgaagattatctggtcgctatgcgtgattctgtagtgaggcggaacgtaccgggctctttcccgaattcttatatgaagacagagaagcgcttcgagctttcttacgagccgatcacctaccgtggcgaataccgcggcgtattgcgtggtctttggcgtatggaaggagataagatgggcggcccgtttgtcagccatgccctgctcgacaagaaaaaagggcgggttattgtagcggaaagctttgtctatgccccggaatcaaaaaaggcgaacttgatccgccggatggaggccgccttgtttacgttgcgattcgtggattaggattgattctctcacgtatataggcgtaacctcatgcgtatatacgcatcggcctacacgtacgtaagtgtggtcttatacgtatatacgtgtggctttatgcctatatagtggtcttatcgtcctaaaaatagtttgatttcctccggaatatatcccgtccgtatacgccactcttgcggatacaggttattggcccggttgccaaggttctttacaaaacctagcggaagtccttggtagcgtaccaacacatatcccttatctgtaccggagggtaagacgagcgcctctttctttaagaatttaatagcgtcttcccattccagttccacggatggaaatgcgttgggggttaaggcagtacttaaagccagctcttgagatgggataaagtctttccctttcgcttctcctaggcaaataccggcggaaagtacccgtaaaggcttggcattgatgagtgaaaatagatccgaatgggctttgggatacgctcgaaggaaactgccgttccattcgagagaaaacgaagtttcatccgaaaggaacagacgggcctcctgtgggatggacggagcggcttttcctcgctcttttttccctttggacttgacacgaatttcctcgatctcgccttccgctttccggagggcggcgaggaaaaagccttcgccccgtgtcttatgcgggaagaagcggtaaaccggatgttcaaaccggagggcgccggtgatctgccattcctcttgggtagggataggcaatgcctcggctcccagctcctctattatataatgtatgttctcctcatcctcttccgtattataggtacatgtactgtagatcaagatacctccgggtttcaaggcgttccagatatcatggatgatgcgccgcccacgggaggcgcaaagccttacgttatctacgctccattcgcctgtgctatccgtatctttccggaacatgccctcaccggaacaaggtacgtcggtgacgatcacgtcgaacagatgaggcaatgcctcgccgatctcctccgggtcattattgataacgatcgtgtccgggtggccccatttagcgatattctcggccaatatataactccggctgcggatcacctcattgctcactaacaggcttccatccggcaataagctcgccagatgcgtggacttgccacccggggcggcgcataaatccaggcaacgtaccggctctttcacgtatgccttgatcgcttgttccagaaacatggaagacgcttcctgcacgtaataggcccccgcatggaatagaggatcgaaggtgaaagacaaccgttccggcaaataaaaaccgctctcgcaccaagcgactggagcacctgctttgggagcgggagtccctttcatcgggttgatacggatacttacgggaacatcagcgcttaacgctgcctctaaacgatcgaactcctcgccaagtaaagcccgtgtacgggtaataaaatcaataggaagtgccatgattattctgttagtttgcggcaaaaatactactttcgcggaaaacaaacagtatgcgagcatctcttttccttataccagttaccttgggcgatacggaacatcgccgtgttttaccagagtacaaccgtgacgtgatcttatccatccggcattttatcgtggaaaacgtgcgtacggcacgccgtttcttgaaaaaggtggagccggggatcgtgatcgatgacttgacattttatgagctgaataaacatacctcaccggaacaagtagctggttatctggctcctttggcgaaaggcgagagcgttggcgtgatctcggaggcgggttgtccggcgatcgctgatccgggtgctgacgtagtggctatcgctcaacggaaggattatccggtggtaccgttggtcgggccttcgtctatcttgatgtcggtgatgggatcgggctttaacggacagagtttcgcttttcacggttatctgccgattgatgcttccgagcgaacgaacacgatcaagaaattggagggaagaatttattccgagcatcagacgcaattgtttatcgagactccttaccggaataataaactggccgaggagttgatccgtacgtgccgtccgtctacgaaactgtgtattgcctcgaatataacgtgtgaggatgagtatatccatactcgcccggtcaaggaatgggcgggtaaagttcccgatctgagcaagaagcccactattttcctaatctataaataaaaggattgatatgagttatcaagcgcacgagacagcggtaatcgatgccggttgtgagatcggggaaggaacccatatctggcatttttcccatatcatgacgggatgcgtgattggcaggacgtgtaatatcggccagaatgtagtcgtatcgccgggcgtggtcttagggaataacgtgaaggtacagaacaatgtgtctatttatacgggggtgatttgcgaggatgatgtgttcttggggcctagttgcgtgtttacaaatgtaaccaatccgcgtagcgctatctctcggaaagaccagtataaggagacggtgattggcaagggggcctcgatcggagctaacgctacgattatttgtggacatacggtcgggcggtatgccatgatcggtgccggggcggtggtaacgaaggatgttccggcttatgcgctggtcgtgggaaatccatcccgccagatcggttgggtaagcgagtacggccatcgccttgtatttgactccgaaggattcgctacttgtccggaaagcggccaacgttaccgcctacacaatcaccaagttgatgagacggggcacgccccgtctcatcaatacagacaatattaatattctatacaaacatgaaaacatcttttttcaagaaaggaatcttagcgatggggatagcttgctgcatgcagctttccgccgtagagaatcctgtagactacgtgaatacgttagtcggtacccaatccaagtacgaattatctaccggaaatacctatccggccacggccatgccttggggtatgaacttctggactccccagaccggcgagatgggcaacggctggacctatcgttacgatgcggataagatccggggattcaagcaaacccatcaaccgagcccgtggatgaacgattacgggcagttctccattatgcctactaccgaaggcttggtcttcgacgaggagaaacgggctagctggttctctcacaaaggcgaagtggctacaccttattattataaggtctatctggccgatcatgacgtgactaccgagttggttccgacggaacgtgcggctaagttccgctttacattcccggaaaccaagaaagcgtatatcgtcatcgacgctttcgataaaggctcttatataaaggtattgcctgcggaacgtaagatcatcggttattccacgaagaacacgggcggtgttccccgtaacttcaagaattatttcgtgatccagttcgataagccattcacgttctcctctacggttaagaacggggcgatccagttggatgagtcggaggtgaagacaaaccatgccggcgctatcatcggttttgagacaaaggccggcgaggtggtgcatgccaacgtggcttcttctttcatcagcaccgagcaggccgagttaaacttgcgtgaggtgggagatactggtttcgatcagctagtgaccaaagggaaggaaatctggaaccgggaattaggtaagatcgaggtagaggatacgaacatcgataacttgcgtactttctattcttgcttgtatcgttccttgcttttccctcgtagcttctatgagatcgatgccaagggccaagtcgtacattatagcccttataacggtgaggtcttgccgggctatatgtttaccgataccggtttctgggatacgttccgctgtcttttccccttcttgaacctgatgtatccggagatgaaccaaaagatgcaggaaggtttggtgaacgcttataaagagagcggtttcttgccggaatgggcaagtccgggccaccgggattgcatggtcggcaataactccgcttccgtggtagccgacgcttatatcaaaggcttgagaggatacgatatcgagacgctttgggaagccttgaagcatgacgcgaatagccaactgccgagaacggcttccggtcgtgtcgcttacgaggagtataataaactgggttatgtaccgaataatatcggtatcggacaaaacgtggctcgtaccttggaatatgcttataatgactggacgatttataccttgggcaaaaaacttgacaagccggcaagcgagatcgatatcttcaagcaacgggctaacaactataagaatgtgtacgacccaaaatataagttgatggtcggacgctctgataagggcgagttcaacccttcttttaaaggtacggactggagccgtgatttctgcgagggtaatagctggcattggagtttctgtgttttccacgacccgcaaggtcttatcgacttaatgggaggaaagaaggaattcaaccacatgatggattccgtcttcaagatgcctagtcgtttgggtatggatagccgcggtatgatccatgagatgcgtgagatgcaagtaatgaatatgggacaatacgcccatggcaaccaacccatccagcatatggtatatctatacaactattccggcgagccttggaaagcccaatactgggtgcgcgagatcatgcacaaactttataccgctgaggcggatggctattgcggcgatgaggataacggacagacttccgcatggtatgtgttctctgccttaggcttttataccgtatgcccgggcacggatcaatatgtgctgggaactcctttgttcaaatccgtaaaactccatctggataacggaaagcaggtgttgatccaagcggacaaggctgatcgggagaaccgttacatcaagggtatgaaagtaaacggcaagacatacacccgcaatttcttgacacatgagcagttgctaggtggcgcaaaaattcaataccaaatgagcgatacccctaataaacagcgaggtacgcaggatagtgatcgcccgtattctttctcgttggaataagaaaaccatgatgcccattgtaagcctgttacaataggcattctaagcaccttacgatgcccattgtaaagaccttacgatgggcattgttattttatgtgaattccggtttgaaataatgatggagagagttgcgttttaccttagggttgttacctttgcgatgactaatcagtttttctatcctctttgtttatccttttaatttagatgtatggcaaactcaaaagagatgacgaggggtgctgtattccctcttctattcagtttcacgatgccattgttattagggaatctgcttcagcagacttattctttgatcgatgccgctatcgttggtaaatttctaggtattaattcgctggctgccgtaggagccagtacctcggtgattttcttgattctgggattctgtaacggatgttgcgctggttttggcatcccggtagctcaaaagttcggggcgagggattatgcgacgatgcgccgttatgtggcggtggggttgcaattggctacggtgatgtccgtggtgatcgccgctatctccggtttctattgccgggatatcttgcgggggatgcagacacccgggaatatcttcgatggggcctatgattatttgtttgttacttttatcggtattccttgtacattcttctataatttgttggcaagtatcatgcgggctttgggagatagcaagactccgttctggttcttgctgttctctacggtcttgaatgttttcttggatttattctgcatcttggggttaggatggggcgtgatgggagcggctatcgctacggttttctcgcaagggctttccgccattctatgttatttatatatgcttcggaaattcccgatcttacgggctacttcctctgaggaccgaaggttccatgccgggctggcccgtaccttgttggcgatgggggtcccgatgggattacaattctctattaccgccatcggcagtatcatgttgcagagcgccaataatgcgttaggtacggcctgtgtcgccgcctttacttccgccgcccgtatcaagatgttcttcatttgtgcttttgagagtttaggtatcgccatggctacgtattgcggacagaattatggggcgggaaagccggagcgtattttgcggggaattaaagtaagtgcgttgatgatgcttacgtatgccgccgctacatggatgatcttgatgctgggatctcgttcgttggctttgttgtttgtagctccatccgaggtcgagatactggactatacggagcagtttttgcatatttcttgctggttcttcccggctgtcgggctactgtgcatcttgcgttacgcgatacaaggggtaggtttcagcaaccttgcgatgctctcgggtgtttcagagatgatcgcacgtatcttggtgagcttgtatgcggttcccgcttttggattcttaggcgtttgcttcggtgatccgttggcttgggtcgccgctgacttattcttgataccggcgtttttgtatgtttataaaaagataaagaaaagattagatgatgagaaagtatcggtgtccgcagtgtgatatcccttctatgtatgtaaagaatgcggacggggaacgtcttttagtgtatgtttacgagaatggggaggtcgttcccaaagatcctactgcggatctgtccggatttgacttgacagaggtattttgcctaggatgctcatggcatggagcgcctaggaaatgccggtgattttaatgggtggcaagttcttataagtcttctttgggtaactctctgatcactctacatgggttaccgacggccacgctataggtgggaatggattttgtcactacactgcctgccccgatcacgctgttccgcccgatcgtgatgccgggtaagacgatcgttccaccaccaatccaaacattgtcttcaatggtgatggggagggcttttgtcctgaaaaataaatcccccgatcgttcgtcccaatcattcacgaagcgttcgttcgcatttatcgggtgcgtagccgtatataattgtacgttgggggcgatgaggacgttatttcctattttgataatattatcgtctaaaaacgtacagttcatattgataatgaccttgtcaccaataaagatgtgcttcccgcattcgcaatggaaatttatatcaatgctggaatacttgccaatgcttcctagcatttggcgtaagagggcatctcttgtagcgctgtcggttatattggttgcgttcaaacgagcgagtaggtttttcgtctgaacgatcatttgcaggacttcttgatccagatggttgcaatactcgcccgccaagaacttttgataatttgtttccataatgattacagggatttgatacggttatttacatatgttgaagttgtatatagaagacgatgaaaaaggcgatagtcgcaatcagggcgatagaagaatatagacggaaaggcttatcttgtttatagcctccataggctagtcctatcaaggcgcacagtagtataccagtagggatgccgaagaagcctaaaacaatgacgctaataagcattacccatcccatggctattaatattttacttctgatagttctcatctttagtatctgtttagttattggatataatagacagttttagtgttgagaaaatggaatcttggcacgtatctctatcctttcggaagtgataggatgcgtaaacgctaagtattcagcgtgcagatagagccgttccgcctttcgtccgtaaagctcgtcgccaaggatggggcaatgaagacctaggggatgggcggcgtgtacccgtagctggtgggtacgtccggtttggggataaaaggcgataagggtttttccggaagtccgttccaatacccggtagcgcgtgagggcaggtttcccaaattcttcgcttacgatttgccggggtctgtccaaaggatcgggacatagcgggagacggatctcaccctcatcttggggaacttcaccctctaataaggcgatataccttttctggatggttcggttcttgaattgggcttgtaggttctgatgcgcttctttggtcttggcggcgagtagcaagccggatgtcgccatatccaagcgatgtacgataattggaccggtggcttccgggtaaaggatcgatagcctttgatagacagagtccacatctcccttgccggggacggagagcataccttccggtttattgatgaccaacaaatagtcatcctcataaaggatatccagcttcgtctcccggtgagagtccgccaataacggattttcatctacccgcaatccctgtagcatatgatggaggatcggctcgcattttcctttgcaagccggataataatatccatggtgccgaatctccgtcttgggagaatcgccccaccagaactctgccatggcgatcggttccaactgatgctggtaggcgtattgtaagagtttaggggcggcgcactcacccgctccggcaggcggcgtaccttgtgaggtaggagcgaacagttcgcataagtccttcacctcgccccgggcgttcaggattcggaattgttcgaacaacttgcgttgcaaggccgccgaccgtcgcttgcgttcttgcttcagttgctcgatctcctgctcaagccgatccaccttagcttgatcctcctccagtatagaccgcaatgatttcttggttagcttgtgagcggctttcatgtgttggctctctttaataagaagtgcggtctcttcttccgtgagagggaattgccgaagtcggtcgcgctcctctttcctctttttcatcaagtcttttgcggcctgtaatacgaaatcgcagtattcgatcgtgctttgtaacctcgaccgtgcgtcttcgagagctggagaggcttgctgggttcggatacgggcattgatctcattgatctgctcctcctcttgccggaagaaaccatccggttgtaataggtcatagatcggggggacgaagaaaggatgtacattcttccccgctaggttaccggagaacgcagccagatagccgacctctccggcgggagtacgaaccaccaatacgccgaacatttttccggtttgtaactcttcccgccattcggttcgttctttcaggtatgcctgcgtctcctcagccgctattacgcatagaggatgcggtgtatagtgaaaaggatacgtgaatcgttccggtaaggggatcgattgtatcggttgggcaaacgtgtgaaacttagattccatcattcattttttaatagacaataagcgtaaacggccggtgccgtaggatctccctcttgatacaatcccggacgggagatacgatcccattggatcaacgaccgggtctctttcgcggagagagcttcgccgacgatctcgttccatgcttgtccgtccttactccagtagaacgtgctatgcgtaccgtcggtcactttcatctgtagatgtaaaggcgaggcgggaagaggaagatcggccaattgatgttctttcccctctaagatatatttcaatatcaaacggtctcctgcgcatccgcaggtgattaggttatttgcgtctccgtacatcgtgattcctttccaactgtcattccggtttacgatcgctgtttccaacgtgtaattcggggaggttgggcgtaaacaaagtgccgctccggtctttacgccgggtttcggtgttccggatagagatagtttaccgttcttgatctcggtcttgacatccgtgtaaggatagttccaactccattcgggacgcaaggtcgcaccggtgaaatcatccgagaaatcgaataccggcacttgtgcggactcggcaaatggcatgggttgcgtgcggcttgcgtattccccggttacgaagtgaggccaatgatcctcacccattctcacctcttgcaggtaaggttggcgaccttggtagaagccgcttcccggctggtaagcgtggcataggtaatacatgcgtccgtccggtgtagtcgtaatcgttccgtgaccgatggagagaacctccttgcttccgtgcaagatcgggtttcctaggtatttctcgtaaggaccttccagcttcttcgagcgagccacggatacggcgtaatcgctctgcgggccgcaacagcctctcacggagtagatgatatagtaatatccgtctttcttgaaccaatgctgaccttccataccttgacgctcatcgtcacgcagcaggctgaaaggctttccgtctaggcgaagcccatcgtccgtcaacttacaggccaataactctatgggttggttatccaatccataaaccttccaactgatgtaaagtttgcctttatcctccaagataaatgcgtctatcgcttccttcccgaactctaccaccgggccgtgatccttgaacttgcccgtaggtgaatccgccacggcaacaccgatgcacgagatgttatccgattgcttccgggccgtataatagacatataccttccctttatgctgataccattccggagcccagaaagaggacttggtccattccggcttctcgtcgaatacatgcccaatttgctgccagttcaccagatcggtagaggtgaaaaccggataataaggggcccattccgaggaggtgccggtgatatagtaagtctgatcgatccgaataatggaaggatcggctacgtcaccgtggatcacgggattggtaaaataggattcttgttgcgctagtcctgtggccaaggaggcggcacagaagaatagtgtgaaaatctttctcatgttttatcgtattttttttaagatgttcttacgtacggttcgcaaagagatttgtagtaaatcgggttccgccagatcgagtagtgtcttatactcctgtaatagctctggaatgggacggcataactcatatcccagtttcatgcaaagcgtttgcacaccgggtaattccttcgctgaaagcatccggtccaagcagaaattaaggaaatccacccgtgggggattcgcttgaggctgtcgtaaaagcaaattcaatagaagacgtcgtttaccgggatgcttgcagaccagaatctcgtttatcaattcatcttgtttatcgtatagccatttattctcatctgtggaaaaatggctacaggcccataacgcttgataaccgatggtctcgtccggatcgaagatcaaaccgtatagttccgatttccgtttctggcttccttgcacatatcgcaatatctcatggatatcctctatgtggatgcggtcagataatctctctcttaaatccatttacaacattgaatcttatatctttcgatcttttatgccgtaaagttatagtctttttagcaaactttctctaattctcttacttttgttcccattcgtttcatcggcgtatacttcatcccatgcgtcacctgctcctcacagacaggctcgaatccgagctttctgtagatggggattgcgtaagaagaggagttaaccgtcatttctgatacgggctgatttaagatcgcggtcttgaacaattgtttaccgattcctcttctatgataagacggtttgataaagaataaggagatatgttttccctcgttttttgtcgcgattacgccaattaaagactctccatcgaaggctccgtagaaggttaattcatttactagttgcttattataaatgaaattcttgaaagtttccagcccctcttcatcgaaatcctttcttccgcattcgatgaaaacgtccagagataagtctaatgccttatcgtattcatttgccggtaattgtcgaatttccatagatatgttattctttttgattctcttctagtttcttatctgctaccaattcaaaatgatgcgcatcaatgaattgtccgtttttgtaacaagcctttctgaaaatgccggtcttcctgaatccagctttttctaatactcgcatggaggccggattatattcgtagaccgtggcgaatatacgaataacctccgtatgcgcgaaataatactggatggcctcggttaacgcatccgaaacaattccttgattccagtatttctcactaatccaataacccacttccgcattgaaacgctctacgtccgtacctctcacaaaaccaatgttaccaatagcctcgccaccaaccgtaatacaaaaatccgatatatctgttttctcctgcgcttgtttgatgaagaagcgggcattcccttttgtataaggataaggtaatccatcccggcagttatcccagattttcttattgttcaaatggaaggctagggattcggtgtcttgatcttcccagctcttgagcgtatataaatcctttattactacaatcataagatgttgtttttacgggataaggacggattctcaagataatagcacaggtggtcatatatttgcccattatacattaactccgcttggtgaagcagcccttcgtatataaatccatttttctgtaatacacgttgtgaacgttgattatgaggatagcaattggccgtgatcaaatgtaaacccatttgggtgaatccgtaattcaatacgctcttcactgcctcgctcatgaagccttgtccccagtatttctcatccagccaatatcccagcatgcgggcatgcggattctcccgctttggatcgggaatgatgccaatggagccaatgacttgttttgtctcttttgatacgatagcccaaaccccttctttcccgataaaaatggcatttagaacatcgattgtctcctcgatcgtttcatgaggtttccatccggcgttattgcctaggtttggattcttacagctctcaaaaacatcaggagcatcgctttcgctgaaaggacggagcacaagacggttggtttctatgttcgatgtttgtgtcatatacggatgtttatttagtcgagatagatcattttcttggtcatcccaccgtcaatcgtaatattctcgccattaatgaaatcgttttcctcttgacagagaaataagcacatacgggcgatatcctccggcttgcccacccgtccggatggatgttgagcatgatcctccggacgaagctggtcgtaattgttattctgtatccaaccgggagcgatagagtttaccgtgatatgccattccgagagcgataaggccaacgcatgtgtcaaagaatagatacctcctttagaggcggcatatccctcgctaccgggttcactcatcaagtaacgggtagagcagatattgatgatccttccgtatgggttctgtgcatcaagggattgccgatggagcgctaattggcgggaggtgataaacgccgggcgtaagtttatggatagtatcttgtcgaaatcctctacgcttgtttccgtgatgggagagaactgactgacacctgcgttgttgataatgatatcaatatctccccactcctcgatgatctttcgcaggcaatcttctagtgcggttttatcactaacgtccacgagatggaattgtgtcccggtttgtagggcagtctcttttcctaaggtctcgttcttgtcgcagaaggccacacgatgtccggctcctctgaaagcccttacaatcgctttcccgatcccctcggctccaccggtgatgaagactcttcttgttttatgaagtgtcttcgttgtatgccccgttctagtgccggaagtcttccgggcttggtattctgcgtacttattttccagataattgtctgccatgattcagtcactattaaatgaggacaaatatagttgttttctgtcgaaccgatttcttttagtcgatattctgtttgggatactaaaatagaaccggaaattgccatctaaattgcttgtggatttgttttaatagaaaagtattgattatgagaatagcgatcagcggggcaagcggatatatcggtcagcatctttcatcttttttggagggaaaaggatatgatgttatccctttagggcgggatttgtttaaggaagattgttttgatgaattatgccgatgcgtggaatcctgtgaagtcgtcattaatttggcgggcgtttccattaataaacgttggacggaggcttacaaacaagagttgtatgatagccgtatttgcgtgaccagacagttggtgcatgccataaacacgagaagcgtgaaacttgagttgtttatttcggcctccgccgtaggttattatccggctttcggggaatatgacgagtatcatgattatcggggaatggatttcttggcccggttgtgtggggcgtgggaggaggaagcgtccgcatgctcatcggacgtgaggcttgtcattacccgtttgggtgtcgtattgtctgaggatggaggggccttgaaagagatgcttcgtttgcaacgcctctcacgggtaagtgtcgtggtcggtagcgggcaacagcgttttccatggatcagcctgtttgatctatgccgctcttttgggtatatcatacggaataggcagatgaggggtgtggtaaatttggtttctccagaccttatcacccaaaagcagttggctcatacgttagcgagagcggataagatccgttggatcatccctttgccggagttcttttttcggctgaagtttggcgagggagcgtcgttcgtgacaaaagggcaaaccgttcatcccaccaaattactggaatctgggtttacatacgtttatccaacaatagagaaacttatgaatataacagatcatcataccgtaccggaactggatgttaaacggtatatggggcgatggtatgaaatcgcccgttatgagaatcattttgagagaggcatgacggatgtgacggccacgtatacgttgcttccggacggaaagatccgtgtggagaacgaaggatataaaggcggcgttcacaaaaaagccaccggtcgtgcgaaacaaccggaccctaaaaataatcccggaaaattgaaagtggctttcttcttatggttctatgcggattattatatcttagaacttgatgcggattatcaatatgcggtgataggaagtagctcagacaagtatctctggatcttgagccgtgagaggaacttaccggaagcggttcgggaagatttactggggaagataacggaacgtgggtatgatatctctaaattgatttcatgagctgatgtataaaggggtaaagccgtagtgattacgcctttgccccttttattactcatgttggaaaacaatcttaatagaggtgatctgagagagtcccttttgctcacatgataggctttacgatttcaattttaaggccaagcgcatcaataatacggaaaaataaaccaactcccggttctatgattcctttttcaattcttgatatataggtcttattagttcctactttttcggccaactcggattgtgtcattttctcttgcttccgtgcgtcactaataatttgccccacacaataagagtatgcttctttgcgaaactcctctctttctggtgagccaaccttgccgtataatttatctaatacagcgtccatactcccgatcttaggatttgcttgcataatattcattttttttccatagtgcaaatataaattaagtttacatatataacaactttagatagacttttcttttatgttttcagttgctttccatcagcaaaggcatttcctaccttttcgcccactctcaaatagtcgttgttgaatggatcaaagatgatgggagcggctttagctacattcaccttgccgttctcatcaagtacacgctcgtcaacactgacatttacgatctcgccacggagtatgcaagtatccggatcgtaatctttcaatttacattcgatagccacggccaattcgtcgatcaacggagcatctacgaagtctgattttgtagcgtgaaatcctgctttggcaaacttgtcggtaactttattgcccgacacgatgcctacataatcacaagccacgacatgatcggcatctgccatgcttaccgtgaaagctctacgcttcaggatattcttaactgtcttgtgaccggcgctaagacacatgctgatctcattcatctcactgataccgccccaagcggcgttcatcgcatcgggagttccatcttctccatacgtggcgataataaatacgggttgcggatagctcaaaggcttcgcaccaaaattctttctcataatcatttattttttagtccaattcttgatatcttcttctgtcgctccgttcatcaacttccctttttgccagttcacatccggataggctttccgcaattcactctctgcgttcgagatattgctgctgcctgatgtggcgaatgggataacggttttgcccgagagatcgtatttctccaaaaaggtgttgatgagtcttggagcttgattccaccagatgggaaatcctaggtaaacggtgtcatactccgctaggttcttcaaatcatcgataatggccggtcgtgatgtcggatcgtccatctctacgctgctgcgtgaggatttatcccgccagttcagatcggcggaggtatagcttttctcaggttggatcttgtgaagatcaccactgacaatagacgcgacttgttgggccgctttttcagtatttcccgttgccgagaagtaagccactaaaacttttgtcccttcggcagccttttgcgcataagaggcgatacataccattgagaccatgaccatgaataatacgattcgtttcatacttcttgaatttttgttgtttttatattcattacgagaatgctatgtatttatggcgataaagataggagagaaaaatgaaacagtttgtacccaaattactgatatatctgatatttttggcgatacgatccttatctttgtaaggcgattaactaaaagaagaaaatatcatgctagcgtacacttatattgaacaagggaaatttgaattgcgggagaaaccgatgccggaaataaaggattcacgggacactatcgtacgagtgactttgggtagcatttgttctagcgatcttcatattaaacacggtagcgtaccacgtgcggtacccggaataaccgttgggcatgagatggttggtgtggtggaaaaggtgggtgccgatgttactgcagtcaagccgggtgacagggtgaccgtgaatgtcgagaccttttgcggagagtgtttcttctgccggcgtggatatgtcaataattgtaccgatcccaatggcggttgggcgttgggctgtcgtatcgatggggggcaggcggagtatgtccgggttccttatgcggatcgaggcttgaatcgtatcccagatacggtcagtgatgagcaggctttgctggtcggtgatgtgttagcgacaggtttttgggctgcccgcatctcggaggtttcagaggaggatacggttctcattattggcgctggtcctacggggatctgtactttgttgtgcgtgttgttgaagaagccacgacgtattattgtttgcgagaagtctccggaaagggcccggttcgttcgtcagcgttatccagaagtcttggtgacagatcccaaaaactgtaaggaatttgttcttcgtaacagcgatcatggcggtgcggatgtcgtattggaggtcgcggggagtgaggataccttccgcttggcatgggattgtgcccgtccgaacgccattgtcaccatcgtagccctctatgataaacctcagcttcttcctttgccagacatgtatggcaagaacttgacgttcaagactggtggggtggatggctgcgattgcgccgagattcttaacctaatagaagaaggtaagatagacacgacgcctcttattacccataagtttccattgaacgagattgaggaggcttaccgtatcttcgaaaacaggttggatggggttataaaggtggcgattgaggggaatctcatcaaacctgtctttgttttgccgcatacactttgattctctcctcgcaacattgtcgtgtgatatcccggagcagttctactttggggataagcgcctcgatatcttctttagtgacgcggaagtgtaaattataacgagcctgaacgtatgcgtcctgcagcaaatcgaaaagtcgtttttcttcttccgtatcccggggaaaggcttcggatgactctagggaatgcgttttggctctgccggataacgttattaggctatgctctttgggactatacaatgtaaaagtcaagattatgctgttgtaataattctcacaagcttgatgcaaatgaaaagaacatattttatatctctcgtcgtttttgtcatacattgcatttcgtaaaaaatcattcgcacgttcaaacctgtcgttgtaatactcctccgccaactcttttatctcccgatagttcagtttacgacggcgggccaacttataacggccgctgttgtaaagcatgataccttctcgcttgatatcggtatagaaatatcggtttttatcgatggctttattcaagtcgtcgatgctttcgtctataaattgtacggtggtggatgcgtatctgttcttccctttgtagtaattatcggtggccttgctcaagatgtgattgataatatatctttggaaacgggtactggtaactaccaaaatatcataatcgctcataaaacaggtgcggataccgtattcgatgcgttggtcgtagtcaacgtatgtattccgggcataacttccgtagagaatgatcatctcgcaatcgggaagtacttccagtacgcactctacaattcttctgaggtcatcccgtttttgttcgggaaggtaattgatggatgttttcattctttgtttatctatgcaaattgtttgtaatcactttttactttcaatgaacattgttctgtcccgatagcctttacgatagctaaaagcggtgcgctgaactgttcggttagcttgttcggtacttgttcggtcgacttgttcggttggctgttgtggggtcatgattttctcccatcattaagtttctgaaaaatgcgatcaagaaactcatatccggttcaacgtcttttcgcacatttctataattcgcacgaaccagcgcattgcgaaagtaccaagagttgtcggcaaacagatcattgttcacgtcaaaaccgatgctacgcaaatgctttatagctgtatcttttaaataatcggatgtttgcaagccatctacagcttgtaaaccaatggctgttttccaagctgaagccttttcttttttgtcgggctcactaccacggatgtatgattcgaaatctatgtccatatgtatccaatcatgattataaacaggcaataaagatataaaatatcctgctatgtgatagtgaaaagatgaagaagttgtattggctcggtcttttacgtattatgagtttcctgtaacattgaatttataaaaatatctacaatatctaccactctattatatactttttgtaaatgagagtattatctgttggttgtagatctccaaacatctacaattattattcaatatctaccatttattattgattttcatacaattttcttttcgtatgaaggaaaaaagtgttatatttgaggaatactgaaaatctaaaagatatgatagaaaaactcgattacgctatggtgccgacaggctttgtacattgttttaatgaaaattgtaagaacgccaaccgctgtttgcggcatcaaatcgtccgttttatccccgatacgctttgggcggtgagcatcgtgaatcccgcacgtaccagtcctaccggaaagtgtgcggctttcatggcggatactcccgtgcaatacgctgtcggcatggatcacctattagaccagataccttatctggaggcgaaacgcatcaagcaacgtctgttgatgacatacggtaagaataagttttatcagtttaagcgcaaggaaagaaccttctcgcccgaagaccaacagtatatccgtcaggtctttcgggcgtacggagtagaggatgaaccagtctttgatgcttggcagagtggctatcgatggacgaagggataagagctgataagagtttcccttaggagaacaaatagtttctcttagggaaaacaaaagtttctcctagaggaaacaaaagtttctttaggaagaaacaaaagttttattaggggaaaactttagtttttctataggaaaaactgtaagcataagttattcaatgtcttttcctgatttatctagacactttttttgtttataaacgtaatcagtagacagtagttataaagtaatactgatatggtagtcacttcttttaacttcatactgataacatagacacattacctatgggccgaacagagcccttctgagagattagtcgtcggctttgcaaagatatcgtatccatctctttctcgttacttttcacgggtcttcttttattccgccacatttttatttgtgtttccttctccccgtgcactatgcccggggttttataaccgacactcatgtgcggtcggcggtagttgtagaagtagatgtagcgctctatcacgctcgcggcacgctcgatggtctcgaacagcccttgcctatagaggcgttccactttaattatcccattgatacgttccgccacggcattgtccgtgggcttgtagtcttctgtcatgctgatggcaatgccatgccgccgaaggcgctccacgtacgcgtcgcaacaatactgcacgccacggtcagagtggtgtatcaggccctccagattttcactccctgtcatctcaacggcctggtctatggcctgccgcaacgcctcaagcgtggctgaggcacgcaagctatcagccagtacccatcccactatcttatgggaataagcatccgtgaccagatgcaggtaacagacgtctccgccggcaagcggtatataggtaatatcgctaacccacagttgattgggagaggttgggacaaagccctttatcaagttcttccacttatggtaacgatggttggaattggttgtgcccctggctttgcgcggaggaagcatcaggcggtgtcgacgaagcagcgtgtagaagctgtcgcgaccgggcatgaacctctctccgaagaggcggtgagcatgatccacagcttgtaaccaccgataccgggatcctcgccacgtatctcacgtacggtatccagcatgagacgttcattcttcacatggctccctatgtcagccttggactggtaataggcttgacgacaatggccaaacagacggcaggctggcgctactttcatcttgcgaagcctgaccagttccgttactatttggccccaggtttttttctgatgggaatgttaaaatactcttccgcacgcctgatcattaaatcacgggcctcggtttccaaccgggagaaggcaagggccttctccaactccttaacacgcttcttgagtcgcgcgttttcatcatggtaatcctctttgcttcgatcgctcatatccgtaggggcttgacacggagccaaagatacctcttttaccactgattcatacttcgccagccatttatttaacaaagttatcccactaataccatgttgtttgcaaaaactggttttgctcatgccggattgataataagaatgaagaagatgcaatttctcttcttcgctgtaatgctcatgtttcttgcgcataataattacacattttattgttattgaatgtgtctacctatatcagcataagacacaacttcttaaataatatattagacatgaaaataaccaagcaaacagcctatcgacataccgtcgcacaacggacgatgcgtatggaggagatcgtggcatgggtaaaggatgagcggacgagggataagcttgcgctctttcgagagaaattaaggcgggcttatcccgacaaacggtatccgtttacccggaaattacctcagttgctctttgccggaacttttcgaaaaggcgagttgaaggagtataatggctggattttgctggagatcaatcgattgaagagcatagaagaggctttgtccttgaaacaaaaaatagtggaatatccgcagacactgttcgctatgatcggctctagcggacggagcgtgaagttcgtggtggcttatacctatcccgacgggtcgcttccccgttcgcgtacggatgccgaggtttttcatgcgcacgcttaccgacatgcgctcaagacgtatgagcctcgcctttcttatcccatcgagctgaaacgtccggtgctggagatgggttgtcgcctcagttatgatgccgatgtgtattacaatccggacgctctttccattcatctggagcagcctgtggctatgcccgacgaaagcgcctaccaggaacggttcgaaaaacgggtgccggtaccggtagagagtgccgggcagacgctttatgaccaataccgttacgttgccatccaatatgaattcgctttgcagcgggctttggaggaacatggaagtttgagcataaaggtggatttcaaacctttgttggtcactcttggaagactttgtttcgcggctggggtagaagaggaggattgtgtgaagtggacgatgctttattgggggaatctgatctcggaagtggagatccgggagaccttgaggcagtcgtatcggttagcctccgattcggactttggttgtacgtccctttacaagccggagcaactacagagcttgaaaatggaggagtttatgaaccgtcgttacgatttccggtacaatctgatgtctggcggaccggaatatcgggagaaaaacaccttctgttttgactatcgtcccgtgacggatcgtgtgttgaacagtatcgctttgaatgcccagaaagaaggattgcagctatgggacagggatgtacggcgttttgtcttttcagatcgcatcccggactatgcgcctatcgaggactatttgacccgcttgcccgtgtgggatggcaaggatcgcatccgtccgctggccgcacgcatcccttgcgacaacgtacggtgggaacagttgttttacacttggttcctgtcgatggtagcgcactggcagggacgtgacaaacagcatggcaacagcctttccccgctcttggtgggcgggcaggggtgcggaaagtccacgttctgcttcaacctgttgccaccggacttgaataagtattacacggacagcatcgatttcagcaagaagcgggatgccgagctgtatcttacccgtttcggattgatcaattaaactaaaaacattcttgattaaataaccaactgtaaatcagcacaatataagactgattctgattgttaaatatgatttacagggttgggagcattatagactacttaggttgtactcggtacttctcccgattaggtaagaacaaataatgtgtctcggacgtgtacattatgtaacttgcgttactttgatttagagttgcctctaaattcctctgactttaatcattctacgatgatagcttcttcgacattatcaggcaagagattatatcctgcatcctctgtcgtttcaactacgtagtctgcgggaaggtctatattcatagcttcctcttgcttacgttcatattcatcccgtaaagcttctatagtttcttcgtcaggtattgttataatcttcggatttaatggaagtgttacctttccacttatgtccgacataaaaccaatataactacacctgtaaaagaatgcgttaattgataggttaaagtaagtctccttataaatgaatgcagctatagcagtattgacatcatgaatgatgaaatatgatttagccaattcatttagcgaggtaactttctcaaagtccagcttaaacatagtgtcctccattctatttacggtaacttttacaaactcaaccttagttaagttttcaatattatcgtatatagcattaaacgcctttgtataggtaactctacaaaataagagtccctttactaaacgtttaacaatctcttcattagagatttgggacagcatattagctgaaataatgaaggagttagttctatcgaacattctccttgactgttcattgtttgtcataatcttttattttaacagttgattattaattgttgatttttaattattaatcgttaattattaattagattatgatatgtgcctatcaacagaccacgattccacctcttaacaattctcataactcgtataagtgctgttatatggacttgtaacgtttaaagatgctcttatgcacaatcaagcgtttgctgctaatggtcttacagtaattaatgtacactaaatcaaagaacacattatttgtactgcaaaggtagtaaagattggcttataatgaaataaaagcagcataagagttccctccgatgctgcttttgttctgtcttagttataagttcgttactccactctttgataagcaaacttcttaccactgggtgtaactccgtctgcttccaattcctgtactgataaggtcattgaattaagtaacagaatatcactgataatccattcttcttcatcgctgtacatttcatagagcttgttaccgtctatcttgtacttgcccacttcattatataaagggttctcggtgcttgtacactcaaatgtaccgtcactcttgtaagttacatgagtggcattggcatcaccacttgtcagcttccatttacctacaatcaaagaagtgtaattgtcctgcttctttgtcacagtaacaatcgcagtcgtactaaaaccgccatcttctgttattacggtaatattagcttcaccagctgaattggctgttactaaaccatcttgatttacacttgcaacagcttcattagaactgctccatataactttcttgttagtagcattatcgggctgtacagtagctattaattggaatgttttaccttgctttagattaacagactgctcattaatagatatgcttgtaacctttacttcgtcagtagcaatcttgccattatctatattgattttaaatgtaaagtccttcttagtgccatcgtaaaacgtcacttcacatttataattccaaatattggttgtgttaccagttaatgtaagaactctctttgcatcagaagttacatcaaaggggggaacaatccaagttgcccaaacagatttagcatccttatagttgtatctactaattgagatattctcggcagagacatcctcaaagtaaccagttctaaatcttattccttcttcataagaaatcagctccgtatcaacaggcataccctgactgtcaaattgaggtggctgattagccacataaatagtatctccttcatttgaataacagcaattacctataaaaacagattcttgaaaccaactataagcagttttgttctttgagtggtcagattgaagctgattacgtttggtcttaccattaaaagtaaagatgttctgacgcaagtatccatttaaagccaatgttacaatattgcctacagtagtctttttatgaaataaaggaaggatattattcaatttgatagtttcatattctccatatcccttataaactttctgaatggtatcagtttcttctatatcagtccactcaaatctaattcctttagttgccgtttcatattcagcaaaccataaatgtttattcttcaatcctgtaaagaggatagatgattcaccagcttgacaaaatctacatgttatattggagtaatctcctatgtattcatcaaacatcttatctattttggtgtgttcatcctctatgttatttataggaggtagaggggaaacatccaattcatcatccccacaggaactaactcccatgcttaatgcaaccaataatgaggttgctaataatctaattgatttcattttattatgttttagttaattaatcagtataaaacaatgaaggcgtgaaactattgaatattactatcgtgaggctctcgactgcccatctctaagtaataaacaatagctcacgccagcctgttatatagactacaataagtaggtatatagcactgacgtgagcgttcttgcctattatccttagagattgaaattgtcgagatttcacgataggataatatgttaaacgctcttcgttaactaaatatgtcctccaacagtgacctaacgttttagatatgagggattatgatgcaaagttaagaaattcgtttgaatggcaagaacttattgtttataaaatgttgagagatgcctaaaatcggggtctttagataagtgctaaaccgacctttacatgtgtaagaactctatgcggaatattcccacttaccttgaattatgaactttatgtacatttgaactccgattaacggctatttgggacagaaccattcagaccactataaagatgtatcttaataatcctgtcccaatcaattagaagctcaaacagtcataagtctgtaagatttcttcctgccttaatcccaagtatcttttagtaatggcaacagaactatggttgaacagttccatgagctttactaaagcaagttcagcattatcactgttcatattatagacctgtctgccgaatgtctttctaagagaatggcaactaaagttcttaatctttaatctgtacttcttcttcacctctttaagaatgatgtttattctctgaactgtgaagatagtgcctttctgacttactaagataggtgcatttattccaactggatttatatgctcgtagcactctttaatgtgctgctgtaacccaaggttcagtctgatagtccttaccttgcctgtcttcttctcaattactgtaaactcgtctgcacctaatatctgtttccaccttagagatagaatatcagatattcttaatcctgtgaaacatcccaaactaataagaagtgagattttataattctcgtctttggctaacttccttattaggttcattgcatcagaccaaacaagatagtctgccgttgtgcttgaatatttaagtgacataatattctgttttataatgaaacgaatagaagtgaatgtttattctcagtgggatttactaactcattgattactaaaggaacattcactaattaacaaagtgaatatgataaggacacccaacttaaaaattgagtgccctctaccttattataattctccctcgtctgcgaagctgtaatatcctgtatctgtaagtatgaggtggtctaagactttaatcctcataagttgggctgcatccttgacttgcttagtaatctccatatcctgcctgcttggtttcagattaccacttgggtgattatgtgcaagaatgatagctactgaattggtgagcaatgcggcttgtagaattactcttacatctacgcttgtgtctgttattccaccctctgatatgagagtatagcctaaaacttggttggattggtttaggaacagaactttgaaatattctttgtaacagattgtaccctccttataggtaggaagtaagtatctataagcatcctctgaactgactactttatgcagtttcttgaatttgggcttgtaggacagttccacttctcccacagtataatctatatccataatgtacaatgtttaataggttggtagaaataaagaaaggacatcaacttaatgatgtcccttcctctctcaatcaacaatccactcagcccaagaaccaagcgtattcactatctcctaatttggcacgttgaatgccttgtacaaactctgtacagttaagattcctctccaagaagttatcaatgtaacttgactttacagaaccattgagcaggtttaagagctgccagcctgtaatgctgtcccctgtactcttgaaattcacatcagaaacgaatgctctacaagctgcattaatttgactgtctcccaacaatagacgaggtaagcgtttctgttggttgggtgtaagagcttgatataatctcatcctgcctattatctggcagaactcactcgttgagattgacatctgcccaagtgtccttaacagatgcaggtctttggatgggttgtaagcatggaacagattcaatgctgctgcatatagttcctgtacgcttaggacttctatcttatcctgcaagccgtcagtagtaagcattaaatttgagcacacacgattacgaaagcctatgaagattttaaatctctcaacagacttcttactgtataggttaatctcgttatatgctctcactccaccaatggataacgctaaacgattaccgtattcatcatgtacaatggatggaatttcaaaacagaaacacattctctgatagaacaaagtcttctcttcatctgtcagttcagatgctttcttacctaatgcacttggtattctgccattgatagggtgtgagattctaatctctggcatatcaaactgttctccatgaaagtaatccttagctgcatccactactgcacctataaaggattggtggcttatggtttcttccattgatgcaaaacttggaataatgcagtcttgttgtagatgctgtaaggttacttcctgcgtgttggcttcaatgaaatggtttactctcttgggtgctgctacttcttccacaatgattgcttcttctgcaaactcacccatgtttaatgattctctacgctgtgccatagctggcataattactaaatctctcataatgaaattgaattaaatggttattgattgaatggatttaataggaacaaacctaaaacacaagtgaatttcttcgcttacatcttaggctgtcctatgtctttccctaaagattctttcaaaggaaatgaggagcattagtaaattaatggttggttgtgataatagtgcatcgtgcctgctcttggattaataagaatgcttatttcagtcagctatcagactgtatttctaaagcattctttttattttagagccatgaggggggaatttaaaggggtgtagtaacgttcataggttttaattcagctatcgggttcagttcagctatcgggttcagttcagctatcgggttcagttcagctatcgggttcagttcagctatcgggttcagttcagctatcgggttcagttcagctatcgggttcagttcagctatcgggttcagttcagctatcgggttcaaccttcgcttcgctcggtctcacaaatttataactgagaatgctctctatctcaaattcttatgaattgggacaaaactattcagaccataataaaggttgattttaatagctctgtcccaatatcggactattcaagtgaatatctcttttcaagtggaatgtaccctttaagacgagtgttgggtatggttattctgtcagaaagtttgaaatatttacccaagtaggtagccttagcttgtaaaggtttaccgttatcatccacaagctcatatctgtcatatatgttctgtaaggtggttactatcttactctccgaatatggactgcctattataaaagtgttatggatttcatctatcggtacgaagtaaatctccttcttatgcgcggatttaagctgccgtttcatggtggctaaatcatagtcgatttctataatcttatccatgccgaacttctcatagtacttgcacagttcgggagcttcatgtcttaaagacctcaattcttcctgttgttcttcggtaaggaatttcaagaccaatccttcgggttttaaatcctgcaaccgttccaatatctgtaactttctctctcttgacaatggtttagcctttacagctttaggtttctctttgtaatgctcataatggtacgacacattaaaatgtcctgtctcattgtaagcattatttaaggactgtaagtcttggtagagcgattcaactttggacttttgaatgtcgcattctaccaagaacgggtttacctttcctttgtaatcatcatttctaaacaagaccttataaatgggaatgcgttcctgtatctcggtcagaagctgcctttccctgcctgtaagagtttcctttaagtctgcaagcatattatagaccttcctctgcgcttccatatcctcaatgatttcttcacgagatttaggctttaaatcctctttccaattcgttatatgtgtaatgtttccaattcctgcacgaaacctacctgttatttggacggaatgggtgaaagggtcaatcatggtctgagccttgcttaaacagtctgtaaccattattatatcgggcttatcaggagtatctaaatctactgctgaatagaacctgctcgtaaagaagctgtactgttccaatatctcacccgacacgaagctgtcagaagccttgtaaccgtcctcatggagtttgtcaatggtattatcctgattggagcaatagattttactgtgattcctgatgtctgctttatctatcaaggtctttgcatagtcaggtgagtttaggaatatagctttcttgttatcgttcaaggatatttgctttaagaactccaactgtacgttattcgttcctattaaggatagattcttcttgtagtcgtaagtgggtacaatcttgatatgactgaacgaatgtttggtaaacccttttaatttgggtgataatggggtagctgaaatcaatgccttgttgtcaaagctaaagaagtcgaagaatggctgaactatggcaggtcggaagtttgcttcctgtacaactttctcgcactcatctatgagcaagaagaagtctttaaagaggtttacacctgcatattcagcagcctgtttgactttggaatagctttcaggggttactataatcttcttgtaacgtatggacttgtcaagcagatatttcttaacatcgtaatccgtaactccttcacgcactcccaataagttaggatatttgacttgcttgctgtcaattacgggaacattgggttcaatgattatggagttacgtttggcatatttttcatccaattcacaagttgtagctcctttggctgtcaaggtcttatcaataatggcattgctcggcagaccgtcagggtagaggtctgacatatattgattctcccgaatttcaacgggttttaactccaagttggtattctctatcataatctgaatttaaagtttaatcgtttgaattatgggacaaaagtaataataattatccttattgtggtctgaactattctgtcccattttagtaaaatttggtctaaaggcaggcatatcgttcaagttcccttaacggctgctgcaatcattccctgtatcggacttcaaacccgttcctgctgcaaatctctttcatttcttctaatgtgtagtaagcatccacttcatcactgtctgtcagtaatgtgttattgggagtatagaagttccgtatgtcagggtggtactgtgccaatgtgtctttaatgaagtaggcgcacttctgttgagcctttcgtggctcgtagaatatgttgaacattccttcaatggtatcaaccttcaggaaacagtaaaccttgtctatgtataatgggtaaatgcctttcacgtattcacgaaggactttcatctgcttttcaaggtctgcttccacctctttaaaatattgctccgtaaagtccgtactgttgaaccgcttaatgttaaaatcagacagtcttattctgtctgtcagtctatccatttgagcctttatggatgaaagctctttctcaatcttggacttccgttccttgtaacgggtcttgtctatgtcattatccaaatataagtcctccaaccttgtaagtttgttctcctgctccttataagatattttaagtgcttcctgttcctcaatggctttactcttgttatcattctctcctgcaatggcttcaagacgttgctcggcattcatcttaccgacatagaacaactgttcctttacgaagttccatatgatagggtttacaatcctttcattcagatagacttggctcttacagcctgtcagactgttcttgtcgcttgtgcatttgaagtgtacggtatctctcttattggagtgcaaccttgtgtagaatgctccgcatatggaacacttgataagtttctgtaataggtacttggtagctctcggataaggggtggtggttctgttgttagccaacttcttctgcaccttgttataggtttcctcgtctataatggcaggaatgtcaaagtagaatgtatcagtaaccttgtctatctcatcatagatattggcttccgctctacccgtataagctctgttgtttagtatgaacttagtgttgccaatgctctttagcttctttatatcagggtacttgccgtagatatatctcgttgtggtaatcaacgcctgtccttcttcaaggtacttgtcgaacatctctttcacgattggagcatattcattcttgactaaatagccgttcttctgtcttgtatatccgaatggtgggatgcctgcaaaccattgtcccaatcctgccgagtcacgtttacctgatgccattctgaaacggattgacgcaagttcttcctccgcctgttcaaatgctttgcgtagctccttctcaaattctaaattgacttctcctgtctctacgtcaatagtccatttccttttatctctaaagtagattggaatgctgtaatcccgattaaatttatcaactaaagttactccatataggaagttcctcgttagtcgggagacctccgatataagaacgacatcaatttcattattctcacaagcattaatcaattcatccacagatttacggttgcccttacgaatatcatctttacccgtcacgtgttcaccgaagactttggcgactttcaatttaaatctgttggcgactttctcaagttccaacttctgacggttataatcctgtatattggtgctacatcttagcaataatgctgctcgtttcattctcttagtgcttgaatttcagcacaaatatagcactttaaatttaatcataaaagttattagtttaatcaatattgatgagttcgaccaagtgagcgcgaggcatcaaggcttcttgaagcatctgttgcagaagccggtcgtaaatgtgcgcaagcctcatgccacgcaggtggaatcggtgaaacgttatgcttcctttatcgctacgagcaaccatacggatttgctgggcgatccttccggcagccgccgtttcatttgtatcgaggtgaaagggatgatagacaatgcccagcctatcgattatctccagctctatgcgcaagcggttgccgccttgaataataacgagcgttattggctgacgcatgaggaagaggtttcgcagatgcaagcgaacgaggcgtttcaacaacgtcctttgtttgaggatctgttttttcaatattatcgtcccgcttcgcataaggaggaaggtttgaagatctctgccggagagatctacctatcgctgcaaaaaaagagcggcgtaaaacttccgatgagcaatgtctccgtctttggtcgtttcttgaaaaagatagggcttaagacgcagttagcgagtaggggacggttgtatttagtggtcgaaaagtagtaaatgatggtagatgtaagttgttggtggtagatgtttttattatctaccaccattagataagtgatttatcccacttctggatcttcccaaacacctgttttgttcattcgatagcttctctctatctttggggaagagtctgcctccagcgcatagagtatttcacgacagaactccagagtggcaaatccgttggcggtaataatgtttccggctctgacggccggttcatttatataaagactttcacctgtataatttggcccagcgaattgtttgaggtaatccaatccgttgctggtatgatttacatggttcaagaaaccgtgcctgccaagaaagacggaggcgttacaaattccggctaccagcctcttcttctcgatggcctcttttaccagaggaacaatggcttcggcttccggggtgaaccagctcatgccacctattaatacgatccctgcataatcggccggaatgtcatggatcccatagtcgggcagcaccttgaatcctccgatcgatacaaccggctctttcctgacagatacggttttaactatatatttgctttgacttccgggttcaacacctgcattgaggtttggagcgatataagccccttcccagtcggcaaagtcttttaacaagacgaatagaatttcttttttcattatttattgtatttatcgaagttatacttctttctaatctcgttttgctcgtcaggcgaaagagatttgaaatatcctttccaacctgggcagaagtttatgtgccaacgccaaaagcgtcccattaatgactgaggacttttatcgtattttttccttagggggcagttgttgcagttacttttttgcatggatgttacagaatgcttgttgtttacaaaggtagtgcttttattggaattgctttatttcaatctttgtttattatgataatataccccatctgatataattgccaatatttatcgtatttttgcattattcgtgaagatggtagttgttatgagcatcctcattggtttgaattggcaaaggataaatgggcgcaggtttataaaactacgggaactccatgtagttgttggatgtgtagaggggaggagtacgaccgcaaaggatataagcaagagattttgcgtattaccaaagaatcagaatattagatgtttaatgaaaagaaagaaaagatgttgaaaggtaaaacagttcttgatggtttgtaagtgtttaatagagccgtacactgttataggctcaaaaatcttacaaacaatgagtagaagtagaaagaaaactcctgccagtaccattgcgtgctgtaaatcacaaaagaaagacaaacaaatgtgcaatcgtcttttccgtagtaagtccaagcaatatattcgtgtaggtaaggaacccccttgcaggcttcgtgaagtgatgaatgtttggaactttgccggtgacggtaaagtttactggggatatgattggcaaggagttgagaaattgatgagaaagtaattaaacatcttcccctttgcgctttcgtacagaggggaagatttgcttagaaaagataatatcaggtttacggaaaagaatacagatggatcaagtgtactttatcctctgacagatttcaaaggattgaatagaatcagttctctccaaaaagcatacaagttcggtaaatttggtgcagttcctaacctataatcagtaaccttatgagaaaagttcgaaagaatacagcaactagacaggtcattcaaaaagttagcgaatagttaattggttctcaagaaaattcagtatttttgcactcacaattgaataaaaacaattagcaaattacaatgctgcagaatagagtgaacatattagtaaacacattatgtcgaagcacagtatgctttgagcgtatgccgtatgttcatactttaggcattgagtcattcggtaaattcaaaaacactttccagcgaacgttttatagacaggtaggagtacattagatgcaggtattcctattaaaaagataaattgaagccgttgaaaagtccttactaaatttttcaacggctttgtttttgcccattggtgacgttcgcattatgtgctctactccgtcatttccgtccatgggcattgaaaacttcagttttattaaccagcgcagtgatgtgcataaaaaaagaagattatggattacaaattcaacggaagcggggtgttctttacatccgatacccacttcaatcataccaatatcatcaggttctgtagcagaccattcaaggatgtagaacacatgaatgaaacacttattgccaactggaaccgtgtggtcggtccggataatatcgtatttcatcttggcgacttctgtcttggtggctctgctgaatggacaaagatactcaaaaggttgaatgggaaaatctatctcatagcaggtaatcatgacatgaagaacttgaggcagaattatacaaaatatttcgaactgatcacgatgcagatgtatatcgaggtggataaacagaagatttatctgaatcattgcccgttcctttgctatagcggctcatacgatgatacctggcagcttttcggccatgtgcatacaagcaggaataacaccggaaaagataagcctcgccttcaaatgcttttctctacacaatatgatgtgggagttgacaataacgacttcactccggtttcattcgcacaggtaaaggcaatcatagagaaacaggttgaactatcaaagaaatgagaatacaatacatgagtgatctgtacctatgcccacttttcaggtagttgcaccttgccacaaagatttggtgctgaacagtgcctttgcgagtgactatggggacttgataagcaacaaccggattgatgcctggatatacggtcattcacatacgaatattgatgcagagattggtggaaccaaagtattatccaatcagatgggatatgttttccagaacgagcatcttatgaatgggtttgattcgggaaagtatgaaaataaagaagatttttttcgggattggcattcattcaacccgatggaaacacgctggtttcatgtcgcttcttccatatacatggagggaagggcaatccggtttacagaccggaaatatacccgtttcgttgtttcaaattattcttcgtatgtttcggataataatgaatactataacgatgaatggcgcagggaaactattacccgtatttttgcctatctgcgcagactggtggatgccgttattgccgatgctgatggcttcaatgaatatgtagccggcaatcttccatatcagcaacggacaggaaagatagcacggaaggattttaacaggatagagccgcgattcaggattgagtcgaaagacagggaaacttccataaaagctttggaagattccgtgaacggacgttctgtgcctccattagagactatgacaatacgacaatattgcaaatatttccgtatagcgcacgaagtgtatgagtcgttctacagaaatttgcctgtcagtaaatacaaccagactgaacagacttatggccctaatgaattgcatggcgtagcttattataatcggatgaagtttgcaaaaattgatgagcagtacgatattgatagtccggatgatttcatctggtttgccaaggatcattatggagaactggggctttcccgcctgaatatctttgcatcagatacagaacggtcaggatgggtgattgtcgtttccaacagttattctgcgaatgccggtctcgccattgaagttgccacagctctgtataagtccggtgttccattaataatccacgatgccgacaagcttctgaagattcttgaggaagaagattatgtcaggttggttccttattcataccataactatatgggctatcaggaggaaggctccgtttatgagctaccgggaatacgaatgtagtgaagatggcggatcatctctgactgctgagcaatacaaagagattgtctcgtttgctgaatggcaggaagaggagagggtgaaggtagactaatgtcatatttcatgtgttaacgcacatctggcaatccgtttggttagtcagtaacatgcaaattatcggcactgattcgaaatagtgccgataatttgcataattctgatatttcaaatatgacttaatcaaattctaactaacaggcattgttcgatgcaatagaattccctacgatagatgaaagaataagaaatctttctaatatgatggattggatgagatatcttccatcagtttcattaggtggagatcaagaatagtattcaacaacgaaataataagttatagagtaatggtgtaagattctattagcatatcgaggataatttcaataaacttggtgttcgttgataacaacttctagagttgctgaaataattaacgagaatatttttctaacattctaaacggaatatcatttgtagtaactttatctatagatattttgtttgtatttagctgtatatcattattataacatttgtatgtattcacaaataagagatccaaacagctttatgaaatgataattgtctatgattttgcctaatttgataggaataagtcttcaaattgcattgagggacataaatttgtctcccgtgtgcgacttgaggggcaaatgggggacaaaaaactgaaaaaataattataacaagagaaaatacgagtgaaaaaagaaaatggagtaatgctttgaagtgactgatttaactcattttacgactttatattttctctttttatgattttgttttcatttggttatttgccgatgcaaaaatgccgaaatatattccccagcacctgatctgtcgtaacctctcctacgatatccgataaatggaatatacactctcgtaaatcttgcgagatgaaatccccggaaaggctggagttcaaaccttcttgtactctatgtatagcttccagcgcatgcgtaagtgcctcgaagtggcggacattcgttacgatgatgtcgctttggtggagggtgggaatggaagagacttccgtgaggagttgttgtagctctgcgatatgcagcttgctcttggcggaaatagcgatttgatgccagccttcggtggggaaagagaaggttgggagagaggatgtgggtaatacatcgcatttgttcatcgctaagataacagacttatttgttaatctcggagctatttcttgatagaaagcctcgaaatccttgaggtcacgggttaagtcgtacatgaggatgacgatttgcgcttggtctagagccttgaaactacgttcaataccgagagcttcgatcgcatcgcttgtttcacggataccggcggtgtcgatgaaacggaagagttggccgttgatattgatcgtatcctcgataacgtcacgggtcgttccgtggatgtcgctgacgatcgctttatcctcgttcaacaaggcgtttagtaaagtagatttgccggcgttcgtctcaccgatgatggcgacgggaataccgtttttgatcgcgttgcctacgctgaaagattgggcgagtttggagatgacctgttcgatatgatccgcaagcgtgcgaagctcgctacgatcagcgaactctaattcctcatggtcactgaaatccagttccagctccatgagagaggtgaaatggagtagctggttccgaagttcggcaagttccttgctgaaaccacctcgcatctggcttagagccaaacgatgttggccggccgaggtggaggcgattaaatccgcaacggcctccgcttggctaaggtccatcttgccattcatgaaagcacgttgcgtatattcacccggttgcgctatacggcatccgctggagataagggattgcaggatttgttgttggatatacgtcgagccgtggcaggtgatttccaccgtatcttcccccgtgaaagaatggggggcacggaaaactgcggcgatcacctcatctatggtttcgtcattgttaccgacgatggaaccatacgttaaggtataagccttttgggtagataaactcttacctgccttcttcggccggaatatccgatcacaaatcttgaaagcatccggcccggagacacggaccactgcgattcctcctactcccggagctgtagatatagcgcaaattgtactcattccgtctattaaaccgttattaattcatacgcttgagaacccagtccgatttcctccgcataacgtaggccggcttgccagttcgtatccggatgaatcaaatggaatttatcctctccctcaaggtgttcgtgaggatgagtctcggctaatttattacctccgatgataggagcgttgataaccatatcggcgcaagccttatccaaggccaccggatcgaaagatgcggcgatccccaaatcggggatgatggcggcatcgttatgattccagcaatcgcattccggagatacgttcatgataaaactaacatggaaatgaggcttgtctgctaatacggctttcgtgtactcgtcgatcttgtaattcaatcgctcggaagtatcaccttcgcccattacggcaccgtcgtactggcaaagagccacacattgcccgcaacctacacaacgctcgtaatcaatttcggcctttcggctgttattcaaatggatggcatcgtgagcgcagtgctttacacagatattacagcctttacaagcctccgtatcgatacggggttgtgaggcgcaatgtaattccagtttaccgcctacgctggcgcatcccatcccgaggtttttcagcgcaccgccgaaaccggcttgctcgtgacctttgaaatggttcatggaaatgatgatatcggcatcggcgatagcggcacctattttcggggccttgcaatattgcccgtcaatctcgatttcccggtagtccgtacctttcacgccatcggcgatgataacgttgcaaccggcggacatgggattgaacccattttccatggcgctttgaagatgatcgacagcgttggagcgacggcccgagtataaggtgttacaatcggtaaggaacggtttcgcgcctaattcacgtaacaggcttaccaagcgagcggcgtaattaggacgaatgtatgccaaattccccggttcgccaaagtggatcttaatggctacaaattgatttttgaagtcgatattggcgataccggcacgttttaccagacgttccatcttatccagcaggttgctgctgggggtcgtgcgtaaattagtaaagtagactttggatgtattcatctttttattggtttagtgttgacaaaggtacgaaaaacacggaacattttttatattcgcgtaaaacagatttgtatatggacttgcttcagcggaatcatcagctattgttgaaaggaataaattgtacattcctgcgttatttgcatgcacggatagagtgggaggatcggttaatcggcatcttcggctctcgaggggttggtaagactaccttgttgttacagcatattaagttgaaatttgaagattcacgggaagccctgtatgtgaatctggatgatttctggtttgagacacattcattgaccgatgcggttaaggagttcctgcaagccggggggcattatttgtttttggatgagatccatttctattcgggctggatggaagaggtctcaactttattggatgccaaccccgccttaaagattgttttcgctaccacttctttgtactcgcagacagaggtgcggaacgggttaaggcatgaggctgctttttatgtcatgcatccgatgtcgttccgtgaattcctttcttacgaaagcattctggataaagatcccattccgttggaagatatcttagcgaaccatcatgatttggtgaaggagatcaatgcggagatgaatattgtgccgatttaccggaactatctggaacatggatgttatcctttttattggcaagacccggatatgtattatttccgtctgcaagaattagtgagaaaagagatttgccgggatttgccttcggtggtttctatttcgatgagtaatctggaacgagctcaaaaatattttatgatggtggctgagtcggctcctttacgtccgaaatcgattgatgtaacccgtaagataaatatgcttcgtcagcaaagcgatagcctgttgcgtttcttccatgatatgaggcttatttattactcggcagaccaactgggaaccactccggccaagcagaaagtctttatgggggataccaacttgctgatctcttttttcggagataaggagaatcggcaattgatgtgtgaaacctatttcttaagccagatgcgttccgtggcgaacgtggaattcatggcgaacggggatttcttgattggcggtaaatatatcttcgccgtaggtgatcccttaaggggatatgatcgtctccgcttcgtacccgacgcttatgcggctatctacgggttaccgaaaagcgtgtttaaccgtatgccggcatggatattaggatttagttattgagaatttaaaaataggattgctatgttagaatgcatgaagaatagaagaagtatccgtaaatatacggatcaggatatcccggagtctttgctgaatgaattattggaagtggctactcgtgcctcgaatacaggaaatatgcaattgtatagtgtcgtggttacccgcgaccctgcgaacaaggagaaactggctccggctcattttaaccagccgatgattacgggggcgcctgtcgtacttactttttgtgcggacgcgaaccgttttgttaaatgggcggagtgcaggaaagcggaggccggattcgacaatttgcaaacgtttatcgcttcgacgatagatgcgatgttgttcgcccagagtttctgtaatgccgctgaggaaaaaggcttaggcatttgctatctgggtacgacggcttataatgcggaccagatcattgaggcgctttctcttccccgtctggttgtcccgatcgttacggttacggtgggttatccggcagagcctatacccgctcaagtagaacgtttaccattggcggctgtggtacaaaacgagacttatacggactttactccggcttccatcgatgccttgtatagtgagaaagaggcattagaggtgaataagcagtttgtaagggagaataataaggaaacactggcgcaggtctttacggacgtacgctatacgaagaaaaatagtgaacatttctccgaggtactcttgaaggtattgaaacaacaaggattcatgaagtaagccctaatacttctaccttatagttcataaagagtccactctcgagtacgcctgtaatcgacttgagggtggattctgtattttcagggatatagtccatccatacgtcaaggatcatattgccattctcggtaatgatcggtccatccttaccttgtcccatacgaagttttatctcacggggattcaaacgctggagtttgtcctctacataggtgagagcttccgggaaaatctctatcgggatcgggaatttagctcccagcctctccactttcttggaaggatcgaccagtatataggtctgcggactggaactgattaacagcttttccttaaacatggcgcctccacgccctttgatcaagttaaagtgggaatctacttcatcagccccatcgaaggtccagtccggcttgtgggaaaacaggctggtaaccggagtgcctagctgggcgcaagtcatccggatttctaaagaagtggggatcgccaaaatggaaagacgttccgttcggatacgttccgctatgcgagtcaacgctagataggaggtcgaaccggagccaacgcctatgacttgtccgttttcgactttagatgcgataagatccgctatctttattttatcttccttatgggagatctgatttccccattccaacgtatcgattaatgaatgatcccacttcatggtcttgatattattatatacggtctaatacagtttcaatcagtttttccaaagaacctttataatccgtattcatatgattatccacacgtccggcgataatacagcatacggtcattgcccggtgtcccataagggcggccagacctgctaaagaggagctctccatctcgaagttcgtaatctttcgcccgttgtaatcgaaagcctctattttccggttcaattccggatcggtcaagggcaatcggagctcacgtccttgcggcccgtagaagccattggccgcgatagtcgttccccggataatatcattacgggtgatttgctcgatcaacgatggatctgccgatacgacataaggccatatgccgctaagccgccaatcaagctgctttattaattcagactccaagtccgcgtcacgaacggtattactatttgcgtagaaataaatgaccccgtcgaatccgatcgatttctccgctgccacataagtcccgatcgggacaaatggctgtaaccctccggaagtcccgatacgaaccagggaaagttgcttgaattccggcttgatcgtacgggttgagaagtctatattagcgagagcgtctagctcatttaatacgatatcgatattatctgtgccgatgccatgggatacaaccgtgatacgttttcccttgtactggcccgtgatggtatgaaactcccggctggaaacctcacattcctgagaatcaaaataggaagcgacggttgtaacccgtgcgggatcaccaacaagtaccacacgatccgcaagttgctccggttttaaatgcagatggaaaacactgccatctgaatggatcgctaattctgaagcggggattgttctcatattcaatcagataattaagtttatattataatcatgaaagggcaaggtatgaaccctgcccttggagatagttctatttatataactattttagtcctttaatggttttgatggagcaccggtcggtttagctatcgcttcacgcatagaagtgtccgcctcgatgttcttcatcttgtaatagtccattacgcctaggtttcctgtgcggaaagcgtctgccattgccttgggaacttccgcttctgcctcgatcaccttggcacgggcttcttgagctttcgccttcatctcttgctcgagggcgacagccatcgcacgacgttcctcggctttcgcctgagcgatattcttatccgcttgagcttggtccatttgcaagaaagcgccgatgttcttacctatatcgatatcggcgatatcgatggaaaggatttcgaaagctgttccggcgtctagccctttgcgaagcactaatttcgagatggaatccggattttccaatacagtcttatggctttcggatgaaccaatggaagatacgataccttcacctacacgggctaagatcgtctcttctcctgcaccacccactaattgcttgatattcgcacgaacggtgacacgtgccttggcgattaactggattccgtctttcgcaaccgctgttaccggaggggtatcgatcactttcggatttaccgacatttgtacagcctcgaatacgtcacgtccggccaagtcgatagcggtagccatctggaaaggaaggtcgatattcgcttttgacgcggaaaccagcgcatgcactactttctcgacatgtccacccgctaaatagtgcgcttccagctcgtcgcgtgtaagcgtctttattcctgccttatgcgcttcgatcatcgcacgagtgatgatgtagggaggaacctttcggatacgcatcaagaataactggatcaaggagatattgactcctgatactttggccgagatccataacaggaacggcacataatagaaaaagattgccagcagaagtactgcggcccccaataggataagtggcaaaaaggttatttccatatataaaaaattaagcgtgaatatttgtttcttctttaggacggacaattacgttgtaactgtctaccctgatcactacgatcggcgtgttctcatcgattaattcgtcttgagatttcgcttccacgttaatacctttaatccgggccttgccgataggggctaagcgtgagagcgtgatcccctcgtctccgggttctattccgagatccctgctggatgtcagcttggaatcgatatctgtctttaaagcgatcttgttaaaagaccgggaacgcaataaccaagcgaagattattccgaatgcaatgattgataaggataaagtcagatgccctacccatatacctaccgtataagcgaaaacgactccgccgatagcgaaaatagccccgcctatacccgcgagtgttattcccggaagaaggaatatctccgccagtatcagtaggatggccgctaccatgaggaagacgatgatggctatgtccagtagcatagttcttcttatttatggttgtttcttaggtatacgatctctgcgttacgtgcctttttctcccattcgtccggttggccgagcaggttgtttaacttttcttccgcatcaagaatcgtaggcttcagttgttctcgcttcgccttgttccctttgatgtagctggctcgtaagctctctagtttctcatttaactccttgatctgtttatggatggaaactactttctcgtagtagttcttcgcttccggactttggatatcgtccaaggtgtaataaacgatatcattatggatcgggaacgtgaaatctttctttatctctatacgtccataaggaatctcggtatgagctaaatgaataagctcttcgtaattcgatccgggtttccatgaatccttgatcgaggcaatagaggcccgggcacgttttagttcgatatcctcgctatctactcgctcgcggttgtcattcggaatgaataggtatacacagacttttccttccggttgatagcggtcggaaacgaaccatcccaattgcttggcttcgtcgatcaccatcatgtaatcgttaaacggggagttatagggcatgcccaattgctccggtgtaagataagtatcggaattgatgttgtaacgagtgacgaataaatcatatccgcccagagagccgttccctttggatgcgtaataaatcgttacgccatcggatagcacgaatggatacccatcgtcggcgtcactattgatattcattggtaactgtttctcgtctccccattgatccatgagtttggattgggtaaaaagacaattgtggttaccgtctgtcgagtgggcgtaataaatcttatcccccttctggttcatgtataccgatgagttgcccggatcgtttgtctggaagaaatcttggtaagtggtcaacgtaccgctttcctcgcttaaggtataggctgataagaaatcatctttatcaacgaccaagctatcgataatctggacattctctaccttatcaagcatacggcttgctttgttcgccaagtccatacggatctggtaaggctccacatcttgtttcttttttgttaggagggtgatgtattcgtcgaacatctcctcggcttcgttaaaacgataggtctggtagtatacttctccaaggtatcgataagcgtcttgtaccctacgctttacggcaaccttaagatgtttctccgctcctgctaaatctccggtctcgaaacagcaaacaccataccattgattataagaggcattgcttggcgcttgtttcactagtttctcgaacacaggtttggcttctgcgtatttcccatcgttatataatttttttgcctgatcaagactttgcgcatgtagttgcattcctccgcatatgagtgtaactcctagcgtataaagcagctttttggataaccgtttcattttgtctattctagattatatatagttatgcagtttcaaagataagaatatttttgtagaggcatacaaatcgaaaagataaatatataattttgcgcccgtaaaggaagtatatggcaaaattgacagaggacgaacgtttgtttcgcaagatagaggataagataaagagagcgattttcgactatggcttgatcaatgatggcgaccggatcttggtcgggttgtccggaggaaaagattccttggccttggtggatttactggggcgcaggtcgaaaatctattgtcctcggtttgaggtcgtggtagcacatatcgtgatgacgaatatcccttattgttcggatcgggaatatcttagaagttgcgcagaggagcatgatttgcctttcattgtccatgagacaagtttcgatccttctacggacactcgtaaatccccctgctttttatgctcttggactcgccggaaagctttgtttgagatcgctaaggcgcataaatgcaataagatcgctttaggccatcatcaagatgatatccttgagacgctgttgatgaacctgacccaccaaggggctttcgggacaatgcctccccggttgagaatggataagtttgatatggagatcatccgtccgatgtgtctggtggaagagagggagttgattcaggtcgccgcatggaaagggtaccggaaacaattgaagaactgtccttatgagtcgggttccagtcgttcggatatgaaagagctgctgagaagtctggaagcgatcaatccggaggctcgttacagtctttgggggagcatgacgaatatacaagaagattatttacctcgaaaaataagataatatgcaaagtgtttatacgattttattgttgatcgtgtctaatatttttatgacatgcgcttggtatggtcatttgaagatgaagcaacagtttagctggttcgagcatcttcctttgtttggcgtaatcctgtttagttggtttctcgctttttttgagtattgtttccaagtaccggcgaatcgcatcggtttccgggataacggggggccgttcaacttgattcaattgaaagtgatccaagaggtgattacgttggtggtattcgtggccttcagtaccattgcttttaagggggagtcgtttaaatggaaccatgcgcttgctttcgtattcttggtagcggcggtttatctggttttcaagaaataaagtcgttgcgtttggctttgatagtcagcggaaaaccttgatgcctattgtaagatgcttacaatgcctattcaagcatgtttataatgcccattgtaaacaccttataatgggcattgttaaaacgctatatgatctgttggctcagatgtgtaaatatagcttcggtctcatccggatggaaccatgttatttctgggtcccgtttaaaccaagtcatttgcttccgggcgtagacccgggagtttcgtttgattttctccacggcgaggtctaatgtccattctccgctgaagtaattgaataattctttataacctaccgtgttcaaggaattcaaatgacggaagggataagcccggcgagcctcttccaataatccttcgctcatcattagatctacacgttggttgatgcggtcgcataattcgtcgcgatctctattaagccctactttgatgatccggaacggacgctctttcttaatgttcgtgcggaaggaggagtaaggcttgcctgtcatccggcaaatctctacggcatggatcactcgtttataattattccggtccacttcctcataatggacagggtctgcttcttttaattcagcgaggataggggctagtccctcggtttcaaattgcatgtatagggcatcccggatctccggtgtaactgtcgggatatcgtcaatacctttacatacggcatcgatgtacatcatagagcctccggtcattacgacggtcgggatcgttttatgtaattcggataggagggagaccacgtcttcctcgaagttgctggcgctgtaataatcggtaagcgagagagtgcctaccatataatgcttgacacgagccatttgttccggtgttggggcagccgtgccgatcggaaggtctttatagagctgacgggagtcggaagagataatcggagagccgaaacgttccgccacttggaggcttaactcggtctttccgactcctgtcggcccaagtaatataacgagggaattcatcaaaagcgctcgtcgtcgtaaggattatccatcgggccttcgcctaaaccgtcgaagccgcttttgtctaattcgtccatatcgtattcggaatccccgtaaaaatcttctcctacgtccgtactgccgttcttagcctcgaactcatcgaaagaaactatttgggcgggaggcgtacctaccgatttgctgcaaataggagcatccaagtcttttcccggaacgatctcacgaagttccatgaagaaggcacgttcggtcatataatcgaaaacgaaaagtagtttttggtgctcgtcttccaacaattcttccagttgagtatcggccatgacatagctgtcttcctcggaagaggtatccatctccactaatgtgatctctgtctttttactccagtcatcgtcacatatgaagaaagaggtcatttgatcctttgtataacctacagagtcgagaatggcgttttgcaaatccaagaaagtagactcggaatcaatcttgatctcgcgcttgaagtcatctgcttcatctgataggattagaaatctaaatagcatagtcgtttagttttattatcgcctcaaaagtagtaaaaatatggatatacccaatatacgtcgctataaataatgaaagagggtgcgcgtctgatccctgtatgggatttcttctgaacctgaggcgaccgtcgtagcttcgtcttcaaccttcgtcaaagagacggaacctgcggctgagatattagtggcagttgtcaccttgaataggtaattgtaatatgggtaaataataaaaatcacagtatcagatatcaatcttttgcatttcgcccgaaaagacatatctttacggcaccgcccgctattgggccgtaacttaaaacctatcaactatggataaaaaagaggaggatcaacgcatgaaagaattaaaagaccgatacatacgtttcgattgggcgatcaagagactgctccggcaaaaagccaacttcggtgtgctggaaggttttctcacggtttttcttggagagaagattaccatcgtggagctactggagagcgagggtaatcaactgtctgaggatgacaagttcaacagggtgtacgccaaggcacttaacgacaagggcgagatcatcatcgtgaaaatataaaatattcgcaagctatattatctcgaacaggtactctatggcgtggcgaaaaccataaccgagtacatatcactgggcgaggactaccacaaggttaagaaaatatactcaatcaacatattctacttcgacatcggacagggcgaggactacctttatcacgggcagaatcatttcatcggcgtacataccaaggatcaattggtagtcaacacgaaagagaggagcgtaattgtctccaagctatcccccgagattttccccgaatatatactcatacggaccaataagttcgataagatagccgtcactcccctagaagaatggatggactaccttaaaagaggaacaattcgtcctgacaccatgactccgggattaggcgaggctcgagaaaaattgagatactactccatgacccccgaggatagatacgcttacgacgaacacctgaatgcggtcatgatacaaaatgacgtattggattcggcgaagcttgaaggatacctggaaggactagcggaaagtagagcggaaaataaggagaaaggtaaggcgaaaggactggcaaaaggcgagacagaagcgaacctcgaaaacgccaagaagatgaaagccatggggatcgatcttgaaatgatccggcagatcacgggaattaccctataaataaccttttggtgacataaatagcgaatcggcgcaaacccctcattgtaagatgtggatttgcgccgatttgtttttggttgtccggatgtttgtgtcgcttattcgtcgatcgaacctcttacgataccccggctggaagacttgatgaaattgaggatcaaatcccgttcctcgctaggctcgtactcggtctcgatcgctttcagcgcctccgtattattcaagcctcgggtatacagcgtgcgatagatgtcttgaatcaagaatacctgctgattcgtgaatccccggcgacgtaaacctacgatattgataccgcaataaacgatcggatcacggccgatcaaggtataaggagggatatcttttccgatacgagaaccgccttgtaccatcacgtgcttggatatacgcgtgaactgatgcaccaaggaacctccgcttacgatagcgaaatcatcaatctctacctccccggcgatttgcgaagcgttaccgatgataatatggtcttttaagacgcaatcatgggccacgtgcgaataagccatgattaagcaattgcgacctaccacggtcttacctttggaagcggtaccccggttgatcgtcacgcattcgcgaagcgtcgtgttatctccgatttccgccgtcgtggtttcccccgcgaatttcatgtcttgagggataccggcaacgaccgctcccgggaaaatattgcaatttttaccaatccgtgcgccatccaagataacggcgtgagaatatatatggcaattatcaccgattacgacatctttctcaatcacggcaaacggatcgatagttacattctggccgatctgggcctctggatgaacgactgctagaggagatatattcattatcgtactttatcttattatttgttttttacaatctgagccatgaactcggcttcactaaccaatttatcaccaacgaatacataccctttcatggtagagatcccgcgacggatcggtgccaataattccagacgtaagatcaacgtatcgcccggaacgactttttggcggaatttcacgccatctattttcatgaagtaggtagaatagcgctctggctcatctacggaattcaagactagcaaaccacctgtttgtgccatagcctcaacctgcaggactcccggcatgaccggctcctgagggaaatgcccttggaagaacggttcgttggtcgtgatgttctttacgcctacgatatagttcccgccaacctcgatgatcttgtcaaccaataagaacggatagcggtgcggcaataattcacggatacggttgatatccatcaccggctcacggttcggatcgtataccggggcttgcacctcgttcatcttgatatccttgcggatcatacgagctaactggttattgatcttatgtcccggacgggtagcgatcacacgtccgcggatcggcttaccgatcaaggcgatatctccgatcacgtcgatcaatttatgacgtgccggttcgttatcgaatacaagcggcttgttattgatatagcctaattcctgcacgttcttgtgagggatgttcagcatatctgccaatttgtccaaagattcttgcggtatcttttggtcgtagataacgatcgcattgtctaaatcgccacccttgatcaagttgtggttgagcaacatctccacttcgcgtacgaatacgaacgtacgtgaagccgccaattctgtcgggaattcgctgagatcgttcaacgtggcgaattggttggaaagcacgggcgaatcgaatgagatcaatacgttcacgctgaacttatcatccggaaggatgatcaacgaagaaccggtttcctcatcttttacctcgatcttgtgttttacgatataataatccttcggagcgttttgctcaacgacccctgtcttttggatttcctcggagaagaagcgagaacttccgtctaggatcggaaattcgggtgcgtttacctcgatcaagcagttatcgatctcgtaagcgtataaagcagccatcgcgtgctcgatcgtacttacttgaacgccattcttgctaagcaccgtacctcgctgtgtattaaccacgttctcggccaaggcgtcaatcgtcggttggccttccatatcgacacgtttgatcttgtatccatggttctcgggtgcgggattaaatgtaatctctatatctaatccggtatgcaacccttttcctttcaaggagaaacttgccgcaagcgttttctgtttttgcataggtctttattgtttattaatttctttcttgagttgttcgatttcccgttgcatttgccccagcgagcggtatatatccggaagacggttgaagatcgcgctggaacgcatgaagtttttagcgttgatcgccggcgccccgagcaatgtcgtcgcttccttcacgtcgctgataacgccagcctgagctccgaatacgacgtggtccgccacatggatatgtccggccaaaccaacttgtccgccaaacatacaatgctttcctacttttacggaaccggcgatgccgacttgcgccgccatcacggtattctcgcctacctccacgttatgagcgatttgtacgagattgtccagcttaacgcctcggcgaatgatcgtagaatccatcaccgcacggtcaattgtcgtattggctccgatctctacatcatcctcgataataacgttgcctaattgcgggattttcttgtaagtctcaccttcgggagcgaatccgaaaccgtcagccccgactacgctaccggcatgaaggatacaattattgccgattatacaattctcgtaaacggtggcatgcggatagaatacgcagttatctcctaccgtcacgtgatcaccgatataagcgtgcgggtataccatacagttcttacccatttttacgccttctccgatgtaggcgaagttaccgacataacaatcgtcgctcacggtcgcggaagcggcgataaaagcggtagaatcaacccccttctttttgctcttcgattgctctaccaaatttaataacatcgcgagcgccgcataagcgttctctacttttacaagtgtggctcttatcggttgttccggtttgaaatcattattcaccaaaacaatgcttgcctcggtattataaatatgatgcgcatatttaagattcgccaaaaaggtcaatgtacctggctttccttcttctattttagagaagttgctgactttaacgttcggatctccttcaatcgttccgttcaggaagccggcaatttgttgggctgaaaactccattacttattcaattatatatgtatcttcgttgactgtccgctgtttatagacagttagtttgcaaaaatggtgaaaattctttatatagcctatgctttgcagggaataattcccttatcatgtagataaccggccatttctttctgtacggcatgtgccgcctcacgggctacgttggcgaaagcctccgtcttatccgcgtaaataatcgcacgggaagaatttaccaaaagaccgcattggtcgttcatcccgtattgagctacttccgccaagcttccaccttgagcgcctacgcccggaactaacaagaaatgattcggggcctgtttacggatatcaaggaacatcttgccttgggtagcgcccactacatacatcatttgctcatcgttagcccattcttgcgatttctttagtactttctcgaaaagacgttcaccatttgcgtcttccgtcatttgaaaatcatgtgagcctttattggaggtcaaggccaataagattacccaagcctccgggtagatcaagaatggttttacgctatcctcgcccatatagggagcgaccgttacggcatctaccttgatatgatcgaagaaagaacgggcatacatctcggaggtatttccgatatcaccacgtttcgcgtcggcgatgataaattgatcgggataattctcccgtaagtaagccacagtcttctcaaaagccatcataccctttgtgccgaggctctcgtaaaaagccagattcggcttgtaagcgacacaataatcggcggtagcgtcgatgatcgctttattgaatgcgaaaataggatcttcttccgacaatagatgttgcgggatcttttttatatctgtatctaatccgacacaaaggaaggattgtttctttttaatattctcgaatagctgttgtttgttcattttcttattcagtatgaaatgattggatgtgtttacaattcagactctttcagtcgctcagcgttctccgctacgatcaggtgatccaagcaatcttgaatttcaccgtccataaaggctgaaagattatagatcgtgtaattgatacggtgatccgtgatacgcccttgcgggtaattgtacgtacggatcttcgcggagcggtcaccggtagataccatggtcttacgcttgctggcgatatcgtccaagtatttctggtgttccttgtcataaatgaacgaacgaagacgggtaagcgccctttctttgttcttcggttggtctcgtgtctccgtacattcgatcaagatttcctcactcacacctgtaatggggttcttccagacataacgcagacggacacctgattccaccttgtttacgttctgaccaccggccccaccggagcggaaggtatcccatttaatctccccttcattaatctcaacatcaaattcatccgcctcaggcaatacggcaattgtagcggcggaggtatgtacacgtccttgcgtctccgtagccggtacacgctgtacacggtgtacaccggactcatacttcaacgttccgtatactttctcgcccgataccgtgaagatgatttccttaaaaccgccggacgagccttcgctaaagctagacacgcttattttccatcccttcagttcgcaatacttcacgtacatacgatatagatcaccggcgaaaagggcggcttcgtcacctcccgttcctcctcgtatctcaacgatcgcgttcttgtcgtcttgcggatcagcgggaacgagcaataattttatctcttcttccaaagcgggaatacgttcgttgcaggtatccagctcctcacgggccatttcccgcatttccggatcttgctcggactcaagcaaggctttcgcttcctcgatcccgttcaatactttcacgtattccgaacgagctcccacaattttctccaaatcacggtactctttgttcagttttacgaaccgtttcatgtcggcgatcaccgccgggtcggtaataagggtaccgacttcctcgaaacggctcactaatccgtctaatttaccaagtaaactattttcggccatttatctttattaataggtgaagcgacctttctcgctttcgataatcaattcatttttatcagcttcctctacgaagcccacgatttgcgcatcaataccaaagctttttgagatgccgattacttcttccgcatgctcgggagcgatgtatatctccatccggtgtcccatattgaataccttgtacatctcgctccagtccgtaccgctctgctcctgaatcgtgcggaataacggtgggatagggaagagattgtccttagttacacgcttgttctctacgaaatgcatgacttttgtctgggcccctcccgaacaatgtaccataccatggatttgagagcgtagtttatcaagcaataccttaattaccggcgcataggtacgtgtaggcgaaagcaccatctttccggcatcgatccctaattcctcgatcttatccgtaagtttcaatcctccggagtaaaccaattcttcgggaacggcggcatcgtagctttccggatattttttcgctaaatacttagagaaaacatcatggcgggcagaggtcaagccgttgctacccatacctccattgtattctttctcgtaagtggcttgtccggaagatgccagacctacgatcacgtctcctccttggatattcttattatcgattacgtccgaacgtttcatgcggcaagtgaccgtactatctacgatgatggtacgaactaagtcgccaacgtctgcggtctcgccacctgtcgcgtagcaaccaacgcccatctcacgtaactctgccagcaactcatctgttccattgatgatcgccgagatcacctcgcccggaaccaacagcttgttacgtccaattgtagaagagaccaagatattgtctacggcacctacgcagagcaggtcgtcgatattcatgataagagcgtcttgggcgatacctttccacaccgaaagatctccggtctctttccagtacatatacgccaaggacgatttggtaccggcgccatccgcgtgcataatattacaatattcaggatcaccgcctaagatatcggggatgatcttacagaacgctttcggaaaaattcccttatcgatgttctttatcgcattgtgaacatcttcttttgaagcggaaacgcctcgcaggttataacgttgatcactcattgtactatattatttgaaccgcaaaggtaatacttttttatgttacttatctaagttttaagacatctccttcctccgggatgtaatctttgtcttttttattcattttatacagactcttgatctggattccgtacatctgcgcaatactgtgcatagactctccgacttgtaccacatggtcgtaattcggcttgtccgctttcttctttttcttttccagatatacgatatcgcctgcctgcaacgggaagtcctcaggcacctcgttgaatttcatcaactgcttggccttgaatcccatgcttcgggcgatctggtcgaaactgtcgttatccttagcgtatacatagatcaaaccgtgggtacgatagacttgataattgaacaccggaagattttgcttcttggtagaggtcttcttttttctcttaccggagtcaaagcggtataactcataatcttcgataaccttgattaatttattcgcgtaagcacgatcggtggcgtaaccgcatttttgtagtcctttggcccagcctttgtaatccttgatgtttaatttgaacaggcgttcgtagcgggagcgttcggcgaggaagcgggaatggtcatcataagaatcctctactcgtttgtatttccggaagcactctccccgcaggtcgtcgtcgtgatagaccctgccgcctcgccagtccgaatggcatttgataccgaagtgattgttggagcgtctggccaagtcgctttgcccagctccggattccagtaatccttgcgctaaggtgatacttgccggaatgcgatatttcttttggtgttgaatcgccaaatcactgtatttactgatgtatttttgataggaagtcagcttccgctggctttccgcccctgcgcttaaacagacgagggacaataataatatacctaaaaaatgaagggataaacgcataactgttcttttcgatccgattttaccggacaaatatataaaagaaaatacatatctaccgggaattgatgggttaaaaataggagatacgggctagataatcgtaatgctccccattttctattttttccgctttaaagccggcttgccttgcgtatagattcagcgtgttgaaatctatatataaccaatcaaatgaatcccctttgatacttttatattgcatgcggaaatcgatctctccgaaataatcatcctcgggggcgatatccagattcccgtcttcatcttcaaataaataacttaagtcgctagagtcaagtaaaagctgtccgtcccgggctagaacctcttttaagcggtgaaagaaagccgggagattttccagtttaccgataatcccggaaccgttcattaagagaagaatggtatcgaatggtccggttaagctcctgtcaaaaaaattctgtaagcgggcgtcttttacgccccgtttgttcatggcctctacggaaagaggggatatgtcgatagcggtaacctctttacccatttcctgtaaagccaaggtgtggcatccacttccggcaccaacatccaatattttgcctgtactgagttgaagggctttctgttccaaggagggcatttcttggaaagtccggaataattgattcacgggaatctcatcttcatcgaacatggaggagaatacacggagtttactcgcttttccatgtgcgagataatcgatgatagcggcgcccatcgggtctttatcggatgtaagaagcattgaatgcatatgtctttattctatatataaggtatattctatgatgtgggtgcgaaattaatatattctttttatatttatagcctataagaattatagttatgtttctttcaaaacattaaaacaatcaagaaaatgaaagaattgaaattagagacccgggtagaggtctatgcggtaggagaattggacaatatatataggcaattgtacgaggccgcttttgaagcctcgaaaaaagcttatgctccttattccaagtttcatgtgggagcggcggttctattggagaatggggagatactttccggaaataatcaggaaaacgcagcctatccgtctgggctttgtgcggagcggaccaccttattttatgcgggagcacgttatccggatgcggcagttcagattttggcgatcgcggctatgaaggatggggaacgtgtggatcttatcacgccttgtggtgcctgccggcaagtgatgttggaaaccgagcaacgttataacaaacctatgaaagtccttctttgtggaaaagaggaagcgtatctcgttccgagcgcaacggccttgttgccgttttgtttcagtaagtctgatttgatctgatagaataaaaagaggcaagaacgattctcgcccttgcctctatatgtaataattaagttcgattagatccctaaagaagccttgatctgattgatcttttcttctgccgctttctctgcctccggcaattcatcgatactctttaccttggagtgaacctcgcaatagaatttgatcttcggttctgttccggaaggacggatagatacttttgtattatcttccgtgaagtattgaagcacattagaggtagtaggcatatctaatgtaacggtttcgttctctgcatagtccttacctttcaatgtagagtaatcgtagaaataagttaccttagagcctgcgatctctgtcaacgggttctcacggaactttttcatcatagcctcgatctcctccgctccactcttgcctttcttcacgacagagatacctttctccttagagaagccgtattccacgtaaatcttctgaagcaattgatacaaactcaaaccttgatcttttgcccaagctgcgatctcggctaagataacgcaagcggaaacagcgtctttatcgcgaacgaagtcctcgcaaaggaatccgtagctttcctcgccaccaccgatatagtttttcttgccttcgttctcacgcataacgttagcgatccatttgaagcctgtataaacatcgtacatttctacgccattacgctcggcgatcgtcttgatcgtctctgtcgtaacgattgtctttacgatatattctttaccattgatcttacctaactctttccagcgagtgattaaatagtaaacgaacatcaaagcggtttggttaccattcaaaagtacccattcgccttcgttattcttaacggcggcacctacacggtctgcgtccggatcggaagccattaccaattcagcgtcagtctcttttgctttctctacagccatagctaaagcagccggctcttccgggttcggagagataaccgtcgggaaatcaccgctaacaacatcttgttccggtacatggataatgttcgtgaatccgtaagctttcaaagcggcaggaaccaatttaacacctgttccgtgaattggagtatacacgatcttcatatccttatggcgggaaatagcctccggagacaaagaaatcgttgttaattccttgatatattcatcatcgatcgcttgtccgatgatctcgatcaattctttatttcctttgaatttaatctcgctagcgttacggatcttgttaacctcggcgatcgtattcttatcgtgcggggcgatcatttgtgcgccatcatcccaataagccttgtatccgttgtattctttcggattgtgagaagccgtcaagatgataccgctctggcatcccagtttacggatagcgaatgacatttccggagtcggacgcaggtcttcgaataaataaaccttgatgccgttagcggagaagatatcggctgatatttccgcgaacttacggctgttgttacggcaatcgtggccgatgacaacctttatctgttctaaatccgcaaattcctttttcagatagttggataaaccttgggtagctgcgccaactgtatatatattcatacgatttgaacctacccccatgattccgcgcaatccacctgttccgaattctaggtctttataaaaacactcgattaactcagtaggatcttcgttgtcaagtaacgcttgaacttgagcacgagtttccgcatcataacttttcgtaagccatccttgtgccttacttcttaccatttctaataagtcgttgttttccatgtttataatattattgtgtttattgttgagcaatctactcaatacgataaatatacaagaaacaaatatacgaatttcttaaagtaaagcaatcaaaggacttatattttgcctaaaaaatacgataaatcgtcctaccaagtaaacggatgtgtataaatcgactcatttccgcaagcatccgttacgattaatttaagttcatgcttgcctctttgcaacctctctttatcgaagcgataggtaataaccgatttattattcatctcgaataagacaaactgcccgtctatttctccccggtaggtttgtaccccgcttaagttatcggacaaacggaatatgaagttctgtttgctgacccacgtctgttggttgatcggcgtgataaccggagcctttgtatcttgttgtatcttataactgcccaattccttgatatttgcgtcgatccagccattacggtatgtaccgcccatccaagaggcacgtccgttttgtaagcgaaccacaccatattgttgtttattctcaagcgtatcgctttgcaagaatagtgataactgggccgttccatgcaaagggattggcttatcgtgcaatatgtgggtggctgataatgaggtactatcttctttcaccgaatagcggaagtagaggtcattatatagattacctttaggcatgacgagacggatgcctttagcgccgaacctattctcgctaccccaatggaataattctgtatgagtcgtatcgatctgggggatctcttgtttctttccctcgatccagatggataaacgggtggcattgccgaaagcgtcagcaagtgtatacgtcaaatgataggtacgaggttcatctatacgcaagattccccggtttacgctttcaaggaagcgtagacggtttcccggctcgatgaaactacgcatatagaaagagcgatgatctttccattcttcgtaatctgtgaatgtgttcagataacgggtctcgtcaaatgcgaacttatcaagattactatggaaaatcacttggctgtctgccgtgagcgtgatttctcgtacgccataaatgttagtcgtattatccatataatcataggcttttacagcgagccctatttctccccatgcctcgatttttccagtgattgtctgtttcccgtttttcgccgtgacgggttttatctcaagcttcttgcttttgccgtttactacgccttttccttcgatggggacgatctgtattccttggattttaggaggacgggtatcggttatccgatccgagaaataatccaaggggtccatgacttcctcggtctcggtgtctcgtatctcaaaatggagatgaggtccaccagagcttccggtattgccgcttaacgctacgacttcatttttctcgacaggaagcaaatccggcgtaaggaagagatttacattgaaactttcttgtgcgtattgttgctcttttacataattcgctattttcttcgagaatttttgtagatggccgtatacggtggtcgttccatccgggtgtgtgatgtaaagcccgttaccgtagccccatggacttacggatatacgtgatacgtatccttcttgtaccgtatgtacgggtttaccttctaccccttgtgtcttgaagtctattccggaatggaaatgattacttcttaactcaccgaagtttccgctcagtaagatcgggaaatcgaaaggattcctaagttgctgggcgtttgtgttgattatgtgggagccgatgattgcgaatagaccggctagatatatggatctaatattcataggtattacgtattttgacagacaaagataatcgttttcgatgaattatctatctcttatcctttggtatcggacttgtacctgatttcatggggcgagcctttcttttttccaatggccgtccggttgaagggtatatactatgcgatcatgaagtcggttgggcctaccttgccagaactcgatacgttcgggaatgacggcatacccgccccagtgagccggacgctccacttcttttccaatccaacgagctgcctctctaatgaaagctcgtataagttgcacacggttgccgatgggttgactttgtggggatatacgagctccgatccggcttttatacgggcgttttttgaaatattgatccgattcatccggggggactttttcagccgtaccttcgatatgtacctgcctttctaattgatgccatacaaacgaaagagagattgccgggttttgtgccagttgcctgccttttcggctttcgtagttggagtagaaaataaacttatcatcatgcaggtcctttaataagacggtacgggtggaaggtttgccttctggagatacggtccctactagcatggccgtgggttcatctactttgctgtctatagcctcttgtaaccattgactgaaaagcaagaatgggttatccggaagttcgctttcccttaatcctccttttgtgtattcttgccggattgaggcgagatttatttccatatgtgttctgtttgcttgttgactacatagcttttcttctttaataggataacaagagatcgaaaaaaaggtttcaaggttttcttttcagcgtttgatctgagaacgtattagaaaatcgactgttaatggtaaatggtcactaaaaccgccctcatatttaaagccgtaataggttcgaaaaggacgtacccctcgccatgttttatctttagtcaataaaaaatcaggagcgaatatgtggatgctttccggaatgatatgcatggaagactcttgcgtgatgagatcccggtttacgattatttgatcgagttggctccattcgccttggtatttatgactacccgggaattgagttatatgggggcttgcgaacaaattataataggtacaagatgtggaatctgtgatctgcgtattttcaggaaaggcttgggcagcgaatatctcggaaatacttctgtcttgaggggtatcattgaagtctcccataatgagtatctgcggcttttctcgtatcagtaacagggaatcgctagatccccgtaaagtgcgggccgcgtcaaaacgatccttttcactttctttttctcctccgtagcgggaggggaaatgacacacgaaaacatctaaggtatcgcctgttatgatctttccatatacgtgtaggatatctcgggttaatttgtgtttgttcccggaaaaacgaattggaatggattcatgtcgtaaataaaagaattgatctcgttgataaagaagagcgacattaatacctctgggatcggggctttgagtgataatatatcggtaatcctgccagcggagcggtgtgcgacgggtaagatgagacaggacggagtcgttctcgacttcgcaaagagctattaaggccggtgtgctccattccccggcagcgcttattactttcgctatttgttgtagcttatgatagtagcggctttgtgtccagtaccggttgccggaaggtagaaattcatcgtcattcttggttggattatcccttgtgtcgaaaaagttctccacattataggtcatgaccttgaacgtagcttgggcaaataacggaggggaggcaaagaataaaagaaaaaacataaaaatcttcatagttaaagctttgattaattgttaatatgtaatgtattcttattggtttgaatcttcggtctcttcctgaacaaactcgtaggctcctatggtcgggccgttcgaactggttagccggttgacaccgtaacgatcgatcggataattcttcgttatctcgggatctgcttttccgactccggtagtcgatacggaatctggccggaaatcataggtgtatttattttgcttgcctcctactttccgataggaaggagtctttttgataaacaagacctccttgaagtgatcgctggaggattctttggctttaagcgcacagtgattgaaccgataatcgaaatctgtactgccatctgcttttaattcgacatcgtaacttccatcgatagtgcaattgtcaaaataagcttgcgtgataggatacgggccatttccgtctactgttacgttattgagcaagtataggcatttactatccaaaggaacagtctcgctggccatttcccttttggttaaactcatgtaattagccatcgtacagtgagcgaagtaatatttaccaccgactaaagtgagtacacttcctccggcattgctgaattccgtatttgtagcgataacatcacaattgatggcgaagaatagatcgctccccatattcgtgatctgtgagttgtttatcttgatctttgggcggtccggggtggaaagctcgcaatatacaccggaggtaccattacgtacgattacattatcccagacattcccgtagctatccgccttaaaggtaatgcctccccattgcccgggagtccggtcatacggtaatatatcatttagtatataatccaaacgatcgcctcggaaagtgataggctcatccaaggtgcctaaagcgttcatggagccgtgaacgatcaggctcgctttatcatgcatatagaaagtagcccccttctcgatattcaatgaaacccctttagcgataaccaaactatcgtagatcaagtaaggacgattggccgtgaggatagaatcttttgtaatcgtaacaccgcctttgtaaagattaacatcctgcccgtaggcttccaataatacggattgacggatgccattcacggtgaaaagtacggaatcctgtatcaacagaggttgattgccaccattcggatcgaccgttacttccacgaatacatacatgctgtcgttggcgagtatccctacattattaaatgagctacctttgcgtccatccacattcatgcggaagccggtagcctctccactggccagcatgatggactcaatgctcagaggttcactatttttattgtagatcataaattgacgggtggtagaaccgatcgtactgaagatcgtatcaaaagcgagcgtgtctgtcgagaagcttagccggtaagtcgggttggtggaataatgatcatccaaaccgtcgcatgccggaagcatgttcaacagaagcgttgcgagtataaatagcgttatcgttaatcttttcattttcgtaaatgttaactgtaaatatcttgtgttcttgttttaatagataaacaaaattatcataaaaaagttgcaagacattaacataaaaaaagaggatagacacggttatcgtgtctttcctcttcttataacgcaaaaaacgttggtttattttgcggggatgctctttaataattcaagaaggtggctccaccataaaccgaccgtagcgatctcgatacgctcgttgggtgaatgtacgtcacgcaaagtaggcccgaaagagatcatatccagtttcggatatttttccaagaacaaaccgcactctaatccggcgtggatggccatgatcttggcgtctttgttgaataggcgtttgtaagtctcctgtgcgatcttcaagatcttagagtcggggttcggggcccatcccggatagccatcgccatgttttacatctgctccagccaataggaacgtggaggctaccgtattggcgatagcgatcttgcatgattcgatagagctacgctggctggtaccgatcaagatcgtattgccttctttcatctttatggaagcaaggttggtagaagtctctaccaagccttctatatcgtggctcataccgattacgccgtgcggacaagcgtgcaaggcgtagattaatttctcggcggtggcattgtcgatatgatactccggacgatccgtggactccatcgctaactgaacgctcgggtctacatgtttcaactcattttcaacgtcggcggcgaaatggttcagcaagatacgtacatcctccttattttccggatgcaagccgatcacggcgtgtgcctcgcgagcgattgcgttacgtaagtttcctccatcgatagagcaaagaacgaaatcatatttctttttcaataagaataagaaacgaaccaatatcttgttggcattgcctaatcctttgtggatctcgccaccggagtgaccgccattcaaccctttcacatcgatacggaaatactgcatcttatcggacgtaggaactggctcataatggaaagtcgcttgtgtgtctttacctccggcgcaacccataaagatctctccctcgtcctcgctatcgagatttaacaagatatctccggtcatgaaaccttctttcaaggctttcgctccggtcaaacctgtttcttcgtctactgtgaacaaacattcgatcggaccgtgttggatatcatcggaggcaagcaaagccaactcggccgctacaccgataccattatcggctcccaaagtagtgccgttggcacgcagccattcgccgtcgacgatcgtctcgatcggatcattgtcgaaatcgtgtttcgtaccgttatttttctcgcaaaccatatccatgtgagactgcaatacgactaccggacgatcctccattcccggagtggcaggctttgacattaaaaggttgccggcttcatctttcttgatagctattttatactctttcgcgaatgattctaggaattcaatcattttgccttccttttttgaggggcgaggcacttgggttacttgatggaagaacttccatacgatagtaggctttaaatcagtaatcttcataatgttacaatgtattatagatgttactctaaagttaataaaaccgcaactgaaagagcttagttcgaaaaaaagtagaataaaatgccaaaaagacacttagtaatcacttaaactcttatatttgcgtccacaaatatagagaaaatgcttacaacgttattatttacggtcataattcttgttatcagtgtcgtgttgctatcgataaaagtgctgttgaaaaagggaggaaggttcccgaatacgcatatcgaaggaaacagggcgttgggtaagaaaggtatattttgtgcgaagaccatggatcgtatggcggtgaagcaaaagggactctatgacatcatgaacgaaataaaagaataaaaaaataagatttaaattgcactttatgaagaacattaactacgttattaacggtgtgctagcggtggctgtcgtaatcttgtatattatgcaattttccggcaagaaagaatcaagcgtaacaagaacattcgcgtcagcgggagacacaacggccttacttccgatcgcttatgtaaatgtggattccctgttacttaattacaattattccaaggatctgaacgagatcatcttgaagaaacaagagaattcccgtgctaacatcacccagaaagcccgtagtttacaaggcgagatgcaagatttccagcgtaaggtagaaaataacgctttccttacccgtgagagggcggagcaagagcaacaacgtttattgaataagcaacaagagttgcagaacttagataaccaattggctcaagagttgatgcaagagcagcagaagttgaacgagcaattacgcgatacggttgtttctcaattgaaggctttcaatctgggtagaggctatcaagtggtattcagcaatacggtaggagataatatccttttggctggcgattcctatgatatcacaggcgaattgctggaatacttgaataagaattattcctctccggccaagtaagctattaatagaatttataaaagaaagggtgtatcaaaggaacgtttgatacaccctttttttaacggtgcttaccggggactttatagaagatatactgtatctgcaaagtaatatatactgcgttggcctggtcagtatatattcatcggtcgggtcagtagcactgcgttttgcggccaattactctttaggagtaacgaaagcggtatatacctgtaagatagcggctacgctcaagcaaaggatccactcggtacggttgttgaacataaagccggaagatacgatcattagaagtccggcgaatacgttgaaacggtggagccggcggcgacgaaagtccaagtccttaaccggaagggtcagatagcaaacggctatacccgccgcaccgacagcgaataaataaggggcgacagcccaatgagtaagaaacaatatggcaccggctaatacgagtaatcccgctacgccgaaaataatcgatctgatttgttgattcatttatttgtccttgataataaaaacatcctcgttcgaccttttcatgaaatactcttcacgggcgaaacgttccagtccctccttgtccgtatgaaggtcgtttaatttcttgctgttgatctcgatctccttttggtaatgtttgatctctttctccaaaccgcgtattttctcgtcgtacgtatagcgtttatacaggctgctatcgcccaccgtaaaggtgacgataaggaacacgatggtaaccaaccaataagcgttgatccacgatagatactttatgtaaaactcttttatgcgtgacatcagaacatcgttttcgcgaagataatgaattattttgtttatctttgtcttatcaataaaaagcagagaatggataattatattgtatcggcaagaaaatatcgcccgtccactttccggagtgtagtagggcagaagtctcttaccactacgctgaaaaacgcgatacaaagtaacaaattagcgcatgcttacctgttttgcggtcctcgtggagtaggaaagacctcgtgtgcccgtatctttgcgaagacgatcaattgcttgaatccgacggcggatggcgaggcttgcaatgcgtgcgagtcgtgccgggctttcaatgagcagcgttcttacaatatccatgaactggatgccgcctcgaataactcggtggacgatatccgtaccttgatcgaccaagtgcgtatcccgcctccaatcggtaaatacaaagtcttcattattgacgaggtccatatgttgacaaccgccgctttcaacgcattcttgaagacattggaggaacctccgcatcatgctctctttatcttggctacgaccgagaagcacaaggtgcttcccacgatcctttcccgttgtcagatctatgatttctcccgtatatccatcgccgacatggtggagcatttgcaatatgtctcttcgcaagagggggtaactgcggaaccggaagccttgaacgtgatcgctcagaaggcggatggaggtatgcgcgacgctttgtctatctttgaccaagtggtaagtttcacgaatggcaatatcacgtatcaagcggttatcgataacttgaacgtgctggattatgagtattattttcgtctgacagatgcgatcttatccggcaatgtgcgggcttctttattgatcttgaatgagatattaggcaaaggattcgacgggcagaatatcataaccggtttggctgggcatttccgggacttattggtatgccgggatgagtccaccttggtgctattcgaggtgggagcttctatacgggaacgatataaggagatggcgaaacattgtccggatcaacttctgttcaaggcgatagagctagcgaatacgtgcgatttgaattaccgtgccagccgcaataagcgtcttttattggaattgacgttgattcagctctgtcaattaacacaggtggccgtcgacgataaaaaaaaagcgttaattgagccgattgctgggacgaatccgtcttctcaagcggtgaatagcgggcagccccaacagccgcctcaagctccttcagttacggcagcggccggtgctccacaagttatgagtacgcacatgccgagctcggttcctgcgccacctccgtctacagcgcctaatccggctcgtaaaacggctcgtccgatggggatctccatgaaggagatcggagtggagaagcctaagcaacaaaccgttcaacaagcgacaacgaacgtaaaggaggtagtaactccctttgacaatgattccttggttcgtgaatgggataattacgccgcaacgattgacaagaaagtgtatcttaagaatacgatgatcaattgcaagcctaccttgcaagagaattattatttcgaggtagctgtacataacccggggcagcaagaggaattgatcaataatgcgatccatatcctgccatttctccgccagcatcttaataacagccgcatccagatgcgtgtccggatcgtagagggaaatgagaagcacttggcttatacatccacggagaagctagagctgctgatgaagataaatcctaccttgggtcgtttgagggatgagtttaatttgacgttagattaagtagatatgctaaagatcccaagaagggatctttagtcttattttttattcctttgtctcaagataaaccacttgagtttgcaaatactcctcaagtccatgttttccgtccgcaccaccgattccggatttacgccatcccgcatggaagccttgcatagcctcaaaattctcacggttaatataagtctccccgaattttaaggaacgcattaccttgaatgcgttatccaagttttgtgtatatacggaagatgtcaatccatattcgcaatcattcgcccatgcgatagcgtcgttgatgtccgaatattcgacaaccggtagcacggggccaaaagtctcttcttgtatgatatccattttctgcgtaacacaatccaaaacggtcggttcgaagaaatatccttttgtaccgatcctatgaccaccacacagtagcctagcaccttgctggatcgctctttctacttttttctccatagacttcaacgcactggcttcgataagaggtcccatatccagatccgcgatctcattggggtttcctacttttacctgcttcatgccggcgactagtttttccatgaaggtctcttttatcgctttgtctacataaacccgttcggcacaattacatacctgtccggtattgatcacacgagaggcaataatggatttaacggcgagatcgacatctgcgtccttcatcacgatagccggggctttacctcctaactccagagaaactttcgtgatattaggagcggcggctgccatggtctgttgtccggctcccacgcttcctgtcagacttaccatgcctactttcggattcgccgagagttcatgaccaatcacgctaccccgtccatttactagattgaaaacgccggcaggcaaacctgcctcctccacgatctgcgcgaatacatatgcgttctctggcgtaagctggctaggttttattacgatcgtatttccggtgatcaaggccggcgcggctttacgagcgactagaaagaatgggaaattccaaggtaggatacctgtcgttactccaatcggtctcttaaataagaaaatgttttcatgagggcggtcactgggaatgatttccccttcgtaccggcgggcccagcctgccatgtaatccatatagtccgcggtaaaaaggacttcaacattggcgagtccttgggttttgcctccttcacggacgatgatgtcggtcagttccttctctctcttacggatgccagccgctatctttgtcagataagcagccctttctatggagggcgttctttcccattgattctgcgctttctctgcggcatcgatcgcttttctggcatcttcaaccgtcccgtcgggcatcagtgaaataacctcttcggtagaaggattcaataccttgatccatttcccagactcattatcaatgaatctgccatctataaacattttcaattctttcatgatactatttttaggttgaataatttgttcttaaaagtacggaaaggaaggaatggcaatgttttaaaaatgataatagttctatcagaaatgatagtgaatcaagataatagggtagatataggaaaaacagcctcaagaagttgatcttctcaaggctgtttttttatagaatgatcgtttttcgttttagcaggctttgaagctcatgtccaagctcttcacggagtgagtcaatgcccctacggagatgaagtctacgccacattccgcataatcacgtaatgtgtcgaacgtgataccgccggaagactctacctcgaaacgtccgttgatgcggcgaaccgcttcttttgtattctcgatattgaaattatccaacatgatacgatcgataccgcctactttcatggcttgttccaactcgtcgaagttacgaacctcgatctcgatctttaggctctttcctttctctttcagatagttttgcgcacgtgtgatcgcttgctcgatgccgccggcgaaatccacatgattatctttcaataagatcatatcgaacaaaccgatgcgatggttcatgccgccaccgatacgtacggcctctttctcgatcatacgcataccgggagttgtcttgcgagtatctagaacgtgtgtcttggtgccttctaacgccttggcgtatttacgagtcgtagtagcgataccgctcatgcgttgcataacgttcagcatcaaccgctcggtctgcaataaggattggatcttaccttccaccacgaacgctatatccccttttttcacttcggctccgtcttgtataaagaccgtcattttcagttccggatcgaagtcgtggaagatacgtttagccatttccacgccggccaatacgccatcttccttgatgatcagctggcttttccccatcgctgtctcggggatgcaacataaggtggtatgatcgccatcgccaatatcctcggcaaacgctaatttgattaagtcgtcaataagtttgtccatcttttattctattctgattgattgtatgatcgctgtattcccttcggcacggtacgtgatgtttacacggtactcaccggaagacgtcggaagctttccgacaaggaaaccgctttcctttttatccgcatgatgtacgaccgagaatccggaaggcttattcgaactgaaaaatgaggacaacatagagacggcctcacttccgttacatttcttagaggaactgggcaaggctacatccaccaccttatccatagcaccggatagagaggaggcatttcctgccttgaaagcatttgatatactggtaatatccgccgcctgcgcacatacgaacgcgaatatcaaggcgaatgtaagtaagagtcgtttcataagctttctttattttattgagtaattagtggcaaaggtatgtatttttcttgtaacttagcctttctaaacatgtaaatgtaagtagatgaagattggactgattgtgattggtaagacggatgccggttattttgtggaggctatcaatgagtataaaaatcgcttgacacattatataccctttgaaatggaagtcataccggatataaagaacgtgaagaatctctctgaggcgcagcaaaaggagaaggagggagaattgattttaaaggccttgcagcccggcgattatttggtgttgctggatgagaaagggaaggagtttacctccatgcaattttctacttatctggaaaagaaaatgcatacggtcccgaaacgcttggtatttgtggtaggcggtccttacggttttagtgaagttgtgtataaggcggcatcggaaaagatctcgttgagcaagatgactttttcccaccagatgatccgactgatctttatcgagcagatttaccgggcaatgacgatcttgaataacgagccttatcatcacgagtagttgcgtcggttaacggcagtataggcgtagccctatacctatactgccgtaagctcacgcctatactggcgtagccttacggcaatactggtgtttttttacccggattaatggactaatttcaacccgacgatccctatcaatatcaaagataagaacaataacctgaatatatttgcggaatcatggaaaaacaagattccaagaagaacagtccctatagccccgatcccggtccagattacataagccgtaccgattgggatgcttttctgggcgagatataagaaatagccgcttaagcccatggataagatcgataaacctataaaccaaataaaatatttggaatgcatacttgctaatttaaagcccagcggccagccgatctcgaataatccggctataattaacagaatccaagccatatagaattagtcttaaaagttttcccgtgtcttttggatcaataaataatccaataaagtcatggcggtcatagactcgacgataggtaccgcacgaggcaatacgcatggatcatgacgtccgcgtgcctttaatatcgtatcctctccctccatattaaccgtttcttgttccatcaagatcgtagcgaccgatttaaaggctacccggaaataaatatcttgtccgttggatatccctccttggataccgccggaattattggtacgagtattgatatgcccgttatcattgaaaaagcgatcgttcctttccgatccgcggaagaaggcggcgttgaatccgtctccatactcgaagcctttcacggcgttgatcgtaagcatcgcatgtcccaacgcggcatgtaacttgccgaacacaggctctcccaatccgacgggaacccctttcgccacacaggtaataacaccgccgatcgtatctccttttgatttgacctcagcgatcaaggtttccatctctgaggcggtcttcgggtccgggcaacgtacatcgctcttttccgtcaagcttaaatcataatcttggtaactacccgctaatttgatcgggccgacctgcgaggtataagcttgaatctgtatgctgtattgcttaagggcgagtttagcgatagccccagccacgcaacgagcgatcgtttcccgggcggacgaacgtccacctccacggggatcacggattccatatttcgtttgataggtataatcagcatgggaaggacggtaaaccgttttcatattgtcatagtcagaggaatgttggtttttgttccagatgatgaaacctatcggcgtaccggttgtctttccctcgtagataccagaaagaaactgtacctcatcatcctctttacggggggtcgtgatacgggattgtcccggtttacgacggttcagctcttgctggatgaatgccgtatctaattcgatcccggctgggcatccgtcgatcacgccgccgataccggggccgtgcgattcgccgaacgatgttaatctataaatattaccaaaagtattcaccgttttgtctaattgaaaattgaaaactgaaaattgagaatcaaaagccgatgattaggcacttctcctaattttcaattttcaattctcaatttccctttatttagtggcatccaccacaaccgcagccaccctcgtggttatcgccacaatcgctaccgcaatcgtcgcaaccgcaactgcatccacctgcgggagcggagaaggcagcgatctcttccgctgtcggttcgtgtacgtcgattacctcgccgctgaaatgcaaagtctcgccagccaacggatggttgaagtccattaccacgatatcatccttcacttccaatacggagccgttcatacggttgccattagaatccatcatcggtacggtattaccttccttgatcatctcggcgtcgaatttaccgtctacctcgaagatattcttcggaagatccaatacgtgctcctcgttatattcgccataagcctcggctggctcgatggagaagttgaacgtgccacctacttccagcccgttcaaggctttctcgaatgccggaagcatcatgcctgttccgtagatgaatttcaaaggagcctcgaccgtcgctttttccattaactcacgttcttcaccttcgccaacgttcaggtcgtatgtaaccgcaacgtatttgtttgctgtaattttcatttgtcttgtattttaaatatgtatagaaatgctcgcaaagatacgattttatttcttatccaccgcctttttaagagcgttcatcgctttatctaaaacagagcgggggcagccaatgttcaaacgcatatggccttctcccccggggccgaagatacttccgtcgttcaacgctagtccggctttgtctttgaacaggtgtactagttcatcttgacttaatttcagttccctgcaatccaaccaaacgaggaaggaggcttggggttggtagacttttatcttggggagatgctgtttcataaactcttccacgaaacgtacattctccatgatatacattcgcatttgttgcaaccattcggcgccataggtataagcggcggtcgtcgctgtataagcgaagatcgtgccatcgccaaactctccggcctcaaggaaagagtaaaattcttcccggatgcgatcattgggtacgattgcgtaggaagtcacgataccggcgatattgaacgtcttgctcggtgccatgaaagtcacgctgcaggaagcggcggtatccgatacggaggcgaacgggtaatgcgtgtactgaggataggccatttccgcatgaatctcatcggagataaccaaaatattgtgcttggcgcaaatatcggccaagcggaccaaggtttcctttttccagacgatcccacccggattgtgagggttgcagaggatcaataccttgcattcatcatctataatagattcaagatgatcaaaatccatctcatagatgccgtctaccatctttagcggattataaacgaccttgcgcttcattttctccggaacgatgcggaacgggtgataaacagggggctggatgatgaccttatctcctttttgcgtaaagcattggatagcgaaagcgattccctttacgattcccgggatatagctgatccattcccgttgtattttccagttatgtttgtagtgtacccaattgatgatactctcgtaatactcgtcggagccgaatgtatagccgaatatctcgtgctcacaacgtttcttcagggcctctacaataaagtccggtgtgcggaaatccatatccgccacccatagtggtatcagattctcgtcaccgaacatctctttcaaacggtcgaatttcacgcaactcgtcccatgtcgttcgataacttcgtcgaagttgtagtgtttcatatttttattaacgatcagtttcttaattgttttaggggtcaaacttacataaaaaactgcgattttaaagcaaaatatgtataaagatgatgtttttgtatagtaggaaactttataaaagacttttctctctaaaaataaaatcagtgaatttgcttcttgaaaaataagagaaacaaattcaccgaatagtataagacatatagtttacttttggtcgaagatactcttagcaatctttaatgaagctttatgtgcattggccaacatggttaattcctgtacaatatccggatgttcttctgctatattgtataattctccagggtcagtacctaaatcatataaaacaggtttatcatatacgattttatccgttgctccataagctggtctataagagaaatgggctttatatttaccttttcgaatcgcatataattcactgcctctgtaaaagtaaaacacatcgcgtttacaagtagactgatcttttaatacatttagcaagctgattccatcataatgccgatctgaaggcaatggaattcctgctatctcacaaaatgtaggtagtaagtctaatgtactagccatatccgttatatatcccggtttaaccattgctccccacataatacatggaacgcggaaccctccttcgaacatggaagctttgccatcctttaacggacccggtgatcctccttcttgtttacataaaagccatggcccattatcggatgtgaaaataaccaatgtgtttttatctaatccttcagattttaatgtttgcaagatttgtcctacactccaatccagttcctctacggtgtcaccatatttgcctctggctgatttaccttgaaagtcagtagaggcatatactggcatatgaggcatagggtgtgctaaatacaagaaaaaaggagaattctcatttgatttaatgtagcggatagcagcttccgtcacttgttgcgttaaattatattgttggggctctctttccagttctttttcttgttcataaataatatattcataaggatattttgtgttgcctaatttaatttgttccttccggctcatatcattggaataaggataaccgtaaaaatagtcaaagccgtgacgtaatggcatgtattctggtaaatgtcctaaatgccatttacctatgcaagccgtatgatatccggcttgtttcagcagttcagcgatcgttagttcctcagaaggcaatccccctttggaatcaggaaacaggactctgcgttgatctccatacattccggtacggactcctaggcggcctgttaataatccggcacggctaggagaggagactgatgctgaaacgtaaaaactactccatttttgtccttctatagccattcggtcgatattcggggtttttatcgtaggacttccgaaacaagataagtctccatatcccatatcatcacaattgataactatgatattgggctttgtcggttgactatgcccgtcatacgaggctaaaactcctgtaatgtacagtatatatttaattttattcatggattaattgtttattaaacgacatggcattcgtgtcttgatattgtttttgtaaacgtataagctccttttccagttgatgagtgatattctcatatcctgtttttccatacaagttgttcatctccataggatcttcttgtagatcaaataattcccatttatcgatattgttataaaaatgaattaatttataacgttctgtgcgtacgccataatgacgtttaacagaatgctccgcagggtactcataaaagtggtaatagagtgatttacgccagttctcaactttttctccacgtaacaaaggcaaaaaggaaataccatgcatatcggatgggatttggattcctgctaaatctaggatggtcggtccgtaatcaatgttttggacaaactcatcgatatctcctttctttcctcctggcaaacgaattaataaaggagtccggaaagattcctcatacatgaaacgtttatcgaaccatccgtgttctcccatatagaatccttggtcggaagtgtagacaatcattgtgttctctaataatcctgtcttttctaaataattcaataatactccaatatttctgtctatggaatggatgacacgtaaatagtctcgcatatattgttgatatttccattcagatagttgcttaccagaaagtttgtctttcttgaatttctgaatgattggatcataatgagcatcccaagctgctttctcttcgggtgtcatactgttatacatgctgcgtccggcattctctaaccctgtagttgtatggatttcattttctttatcagccatttttaaatcatagactaaatccatatcttttatgatactcatcttttgctcatgagcggcttgacgaccgttgtagtcgtcataaaaattggctggtaactcgaatgtcgtatcgctgaaaagttgtaaatcacaagtatcgggcatccatgtacgatgaggagctttgtgatggagtaacaagcagaaaggcttatttttatcatgtatattctccatccagtcgattgctttttctgtgatgacgttggtaacatagccttttgatgggacctgtttcccgtttttgataaatggagcgttgtaataaatgccttggcctattaaaatttccgaataatcaaatccggtaggagcggaagttagatgccactttccgattattgctgtttcatatccggctttttgtaaaagtttggggtatgtttgctgggaaccatcaaatgtggaactgttatcggtgaaaccattagcatgactatgtttaccggttaatatacaggctcgactaggtccactgatggaattggcaacaaagctattggtgaaacgtactccctcgtttgccagtcggtctatattgggagtttgtatgaagcgtttatcataagcactgattgtctggtaagaatgatcgtcagacatgatatagatgatattcatcggcttttttcctgctatctgctctgaatctgtttttttgatgttgcaggaagtcgtagctattaaagcagagaatgtgaataataattcttttttcattatttagacttttattgtgttcgtgattaaggaatttgtttgttacagggttttagcctaaaatttgtgaggaaagactttctcttttattaggctaaatcctgtaatcaagtaaattaccaaccggggttttggacccattggttacctgtaagcgatagcatacgaggttgtatgggtaataaataatctcgttccggattgaattgccatccgttaggataatgcttattattgaacggtatgatatagcgtttggagtcggagggcgtacctgttaagaaaagattttcaccttcttgcaggctttctccataagcggtttccaaagagctccctttgaataatgcacctgttggagtttttccaataatgaggatgtctgcggcggcccagcgcaagatatcttggagccggcttccctctaaagctttttctatgcgtcgttctcttcgtactgcttgtatatatttatccaatttattaaacggataatcgggatcggtattgaactctctgtcgaaatccatctcgggcatgcccacacgctctcgaagtggccttaaggcttcttttattttgctagcgttagccgcgccatctaattctgccagagcctcagcgtagtttaataaaatatcggcgtaacggaattgtatagctggcgcttggcttttgccttccccatctatagtaggaatataagtcgtattatattctacgtattttaggatagaataacctgtcgtattttgattccggctttcctcattcaaaggaggaagtttgaatacgaattctccatttggacgtaaatcttgtcctggcatgcaaatggtctgggataatcgtgggtctcgtaagtccggactcaattcgtccccgtacattacctttgctttgtctcgttcggaaccgacaaaaggttttccttcttttgttaaaccttaattccgcaacactattacaaatataactttttaagtacctgagcaacaaaaagttgctcaggaatttgccatgtcagatttttcacctatcttagtgttgcaaatcaaaatatgtatcaaacccgacagacatggcaaaggtagcaattaaatccgagaaactcactccttttggaggaatattttcaataatggagcaatttgactccagactctcatctgtaatcgactcaaccctcggtatgagatgcaggctgtatggttatcaatacagcgaaatcatccgttcgcttatgagcgtttatttttgtggcggctcatgcatcgaggatgtcaccactcatctgatgtaccacctttcgcttcatccgacacttcgcacatgcagtgccgacacgattcttagagccataaaggaactgacccaggataacatttcctacacatccgacactggcaagacctacgacttcaacacggcagacaagctgaatacactgctcctcaattgcctattgtccacagggcagctgaaagagggcgaggggtatgacgttgacttcgaccaccagttcatagaggctgagaagtttgatgcgaagcctacatacaagaagttccttggttatcgccctggcgtggcggttattggcaacttgattgtcggcattgagaacagcgacggcaacacaaatgtccgtttccaccagaaggacacgctgaagaggttctttgaaaggtttgaacaaaacaagcttattatcaaccgtttcagagctgattgcggctcgtgttctgaagagatagtggaagagattgctaaacactgcaagaccttctatatccgtgctaaccgatgcagttcgctctacaatgacatctttgccctcagaggttggaagaaagtggaattgggcggcattgagtttgagctggcctccattctcatcgagaaatggaaagggaaggcataccgtcttgtgattcaaagacagaagcggatagacggcgaactcgacctgtgggaaggagaatacacctaccgctgcatccttacaaatgactacgagtcttccgagaaagagattgtcgaattctataacctccgtggagggaaggaacgcatcttcgatgatatgaataacggattcggctggaacaggcttccaaaatcctttatgggagaaaacacggtgtttcttctgcttatggcactcatacgcaacttctataaattcatcatggcgaggcttgacgtgaagaggttcggactcaaagcaacaagccgcatcaagacgtttgtctttaagttcatctctgtgccagccaaatgggtcaggacatcaaggaagtatgtgctgaatatctattcatgcaacaatgcttatgccaatgtgttccagaatgactttggataacaccgacaacttatagtcgtgattttgcgtattgcctcaagtcgcatggtggggtaaggggcatttatatgtctttatggtgacattcgatgcactgtgccccctttttactaacgatgcagattcttttcgcttctgtatcatattaggcgcgtagttgcggatttgaggttaaataatcatcaacaagagaagcggatgccccacaagtgccacctcctttatttaaataacgtgttacggaatggccgatgttattggcggcatcatatttcttccaccataaaacttctggattatgtgagagatccaaagtgatgaacaagtctcgataagcggtattgggatccccttttgagatgctccataccccttcgtctattacatctttagcggcatctgcggcttgccgtagataagagctgattttctcatcagttacttttttatcatagaatggcgtgtttttcgcacgatggtatttctcccaagtaccttcaaataaagcgacctcactcttaagcgctcttgctacatctttgtgtacacgcattgtcgagctattggtttgagtgtttagatgctcgatcgctatatctaaatccgccaatatactatcagcgacctcaagcctactgtttcggggacgttccatctgttcttgaatcggatctaatactttcgttaaccaagtgacttctccataattaacgaataacctataataatagcaggctctgaagaaataagcttctccgatgcattgctccatttccggaccgatctcctcgcaattatcgaggttgttgattaagaagtttagacttctgatatgtttatactctgttaattcgacagcggaacttaatgtggtttctcccgcaagacgtgtgtctattacattactctgcatattatcgctattcaagtctccaaaggcgatacccgttggatttccaatgctgttagattgttcctttatggcagagtttgccacatctttgtcattaattttaagagttgattcataaaactgattcagatacttggtgatttctgttgtactggtgaaagaattgacagaagacaattctccttccggatatttatccatgtcgaaacagctacatagccctaatagacatagggaaaccattgatagatatattcttttcataaataaattacgctttatagattaacaataactccgatagataacactttattcattggataattctttccggcctcactggtatagtcattacctgtaaaaatagcttccgggtcaaacatggaaggaagcttggtaaatgttagaagattctctccagagaaaaacacttgtgctttgctcaacccaattttctggctccatgaattaggcagatcataactaattgtcagatttttcaaacggcaataagcggcactttgcatgtatctgtcacttttttgtgaggtcttatttcgaaactgattgatacttcctgctgctcctgtataaggattgggataataggcgtctggattctctggagtccaataatctagatgatcgttgaataccgtgacttgtgcataagctcccgatccccaaaagtaaacggttcctagatctggagaccaatttcgttttcctatgccttggaacatcatgctaagggaaattcctttccatgaaatggaaccattaagcgtatattgatatcgaggagtcgtattcccgataacacacatatcacccatatcttccaatgtgttatttccattgttgatctttttgtcgttatttaaatccatatatttaacatctcccggcatccatttttgaccggataagaaagataaatcgtatgtgttattatatgtgtcagcttcttcttgggtctggagtagcccagaggctttgtatccccaaatctcaccgactttcttccctacataccaattatcttgaggattggtccctgtcggattttcataagctgtaacttcggatgtcgcatcagctaaagagcctcctattgaataatgaatatccttcccgatttttcctcggtattgcaggctaagttcccatccccggtttctcatccttgcgttattcgtattgggagcctctgctccaaagaaatctgcaaggtcggcacttggtcctaacatatcttttgtatcccgctggaatacatcgaaggtgccggtcagagcgttgttaaagaacccgaagtcaaggccaagattcttactttccactttttcccaagttgtaaaaggattaataactccaggggcgtttatgtacatatctcttccatcttgaaaataccaattacctaacggctggattcccatgattgaggtaaaagtataaagtccggctccgctttgattccctaatagtccccaagaggctcgtaactttagattagataatacctctaaagatttttccatgaaagactcacgtgtaatattccatcctaaagagaccgaagggaaaaatccccatctatgatctgaggcaaaacgagaagaaccatcgtagcgtccattcacttctaataaatagcgtccgtcataatcatagttaatacgtccgaaaaatcctcgggtagcccatccgtttcgagtatctgtcgtggatttttctcctgtgccaagattgaggcctggattattggtggagatcatgtcggttacagactcatataaatagctatatgcgtaattttcttcttggtaaccagccataacggtgaaattatgtttatcggccaaagagaacatatagtttgagtatagattaattgattgatattggcttaaggcggatgaacgggtgaattgcccattctccatcacgcctaattcttgccttgtccctttgtataaggtctcgttatccgctcccgggatcatcggggctacgttgagcgcctcataattctcattattttgccggtacgtatagtcgaagaatattctccagttcttgattggttgtgcttcgagaccaccagtcagtgtcagattatttttctgtgtatttgtatacgtgccactttgtaaatagggaatcattgtaagctccgtaaaatgaccattaggatcgattgggcttatggtaggacggaagcgagctaatgaatgataaaagccttcagataaggcccctttaccaaaaggtgtgtcattatccgagttcatgaatttagtattaactttcaaatttagccagtccgtaatttgagaggcgatatttgcattgaaatttaagcgtttatattttatgtccgcatatcttaaaataccatcttccgtatacattccggtagagatataatattgcgcttttttgccacctccactgagactcaaattatggttttgtttgaatgcggagttcttataatgtaaatcaaagtaatccacattgcccaaaccctttggtgtgttttcgaatgctcctactagattattttctccattaagctctgcccaaggatttacgctagcaggatctttcatgtactgctgaagttgctgtaatttttccgggttatattgcttgattacgttagcattggtacaagcttgattgaaaaaagtcgcatagtcataagcattagccatttccggcattacagtaggggaactccatcctacggtaccttgataactgatgcgcatcttaccttcttcaccttttttcgtcgtaactaaaattacgccataagcggcacgggcgccataaatagctgcggaagcggcatcttttaagacggaaatcgattcaatatcattggggtttacatctgccaaatccatctctacaccgtcaactaatacataaggattcgctgtgttcgctaaatttccttgtcctcgtaaactcaaggctccactagctcccgggcgacctgagttggagttggatacggttaatccgggtactaatccttgtaaactttgagttgcgttagctactgggcgttggctgagttcttcgccttttacggcagaaacagatccagtaaggtttacctttttctgtacaccgtatccaacaactactatctcatctaacttctgggtgtcttccgtcattgtaacctgtaaggaggtttcttccttgactgttatttgtttgtcggaaaaaccgatataagagatatttaagatggcattttcggtaattattaattcaaattttccatccaaatccgtaatggaaccgtttgttgtaccctgctcaattacatttgctccgatgattggtaaaccgtcagggtctacaactgttcctgttatttttcttgtctttctcggagcttgcggtgaagaagatgatttaactgttaatacaatcatattattggcctcttttttataggatatttccgtattggctaataagaggctcatgacttcatcaatgtttttatcctgtacggatattgacgttttgtgatctaggttacttagatcactgttatagaagaatttgtattcccccgccttttctatctcttttaatatgtgacggatggattggtcttgtacatccagtgaaatttgggcataaagtgaaggagccaagattaaactactgaatagtgccagaccgactgttttgattgaccgtatttttatgtattgtgatacacggacaagtttttttttcatacttttgtattctatggatattagtacttgcgcttgctatttgcgagatacctaagcgcggttaactgatttctttttcggggggaaatgcctagcatttctaccccgattttttacgggcttttcatgaaattgctatttactgttttaatactctgttatataactcttttttgtcgttgttctcatacaaaataaccacactgtcttttatctcgtaggctaatggtgaggtaagagacaataaatgtaagatgctcgctagactggtattcctgggcttacctgtaaaacgataactctttaaggcctcagatttaaatacgatctgggtattgtaataacgttccagcgtatgagcaatctcgctgaatggtgttgactcaaaattcaatgtattgtacatccaactggagtaatctagactattgtcaaccttgtttttccccagtatgctagagtgtttattgaaaatagcttgttcattaggcaacaggtctacatggttatcgtttgcggttacttctactttcccggtcattaatacaacggatatgtgctcttccgtgttatagttctttacgttaaaactggttcctaaagcttttacggatacctttcccgattgaacgataaaaggacgtttagcatcgggcttgacttcaaaataagcttcgccttctagattcagaacccgttcatctgcattaaaacggcttccataagataactttgaatctgaatttatccatccttttgaaccatcaggcaatgttatattcgctttttgtcctttctcgacagcgacaatcatgtccatcggttctcgctgtttatccattgcataatgataggtgacaatacttgttgttatgagcaataggataattgctgtgatacgtagcgcataatggaaaagtgaagggagagaaagactcatgaatgtccttttccctgtttctttaaaaaagatttgtttacggagttcgtctagtaaatgttgttttactgaaggatccatttccatcggggattgcatccatatatcatcagcccatgtgtcaaaagcttttcgttcttttagccattctatcaatagctttatttccgatggagttgccttattctctaggaacttgttaaatatatgtatgtaatcgtttctttccattttcctctgtctttattcagtatacaaatgacagggaagtttccgttatcgcatcctgtggatttagtattcattaactattaaggaggcaacttaaagctaaaagtcctaggtcgtattggtcttttaaccttttgcgtagaaaggagatggctttggtcagttgggattccacggtattctctgatatctgcaattggtctgctatctcccggttggataggtgggattgtctgcttagtttataaattctttgccttccttcgggcatttgttgtattaaagaatcaacgaattcttccaggagatgatattctacgatctcgtccgtacctctggcataaggagttccggggtggtcgatttgttgttctatatagagaatctccatcattttatgttggtaatggttagttaataagttttttgctatcgtacataaataggctccaaaagacagttttgggtctaattgttctcgatttttccatactttaagaaatacagtttgtaccatttcctctgccaagtaggaatccccatgagaaattttcatgacaaaattatataatttgccactccaaaccgtgtaaagatattcaaaagatgaacgattaccctttctaaggttctcaatatgcttgttcctctctcccatggattaatccatcaacaactttatgaatagtcgcgatattagctaattttcttgaggagggcaaattttatttaagaactagcttggaactatataaatttcctgtttcgctattggggcttttttatgaaatttggtggggatagacttttctatgtgaaccttgttgacgaaatgtcaaagtgttattattgctctctgtgggtgatgaattatggggcgggggcttggtcgcacggaaaaaacgcaagcatttgatggttgtgtaaatcagaatgatgtttgaatgcaggtcttgttggtctttttttatgattgatgtttgaagagctgtctatcggttgagtatttaaggctttctctgtctgaaagtcattttgaaaatgtctttgcttgagctgcttctagcgtgggttatgccggatttagtcttgattttaggtgatttttattcgaatgttaacaaaatttagtccgatactagatgaaatttcttccttatgttcttcagaaaacttccttatgttttttctagaacactattatgaattttttcaaggctatttatagtctacaagtgttaataaatatgtgatttagagtttatatgtatcttttttatcgctagaataggattttcttatgagatacgtgttatcgtaagtcgtgttatctgataaaaatgttatctggaatctgttttagataacatttgtctttttactgtttctgtttggaaatcgaagttttttcccttctataccttccgattcctaagtaatacactcttgctcctattaaaatgcaatcctaaaatggtatttgcttgagaattgaaagaaaaatgaagaattttcttttaaatcctttgcgcatatcaattattgttctacatttgcagcgtcaaacaaacaaagacaataagaaaagatgatgaacaacgtattgcatattattctcgtggtggtccttctagtcattagtaggtaaggagaaaggtgtgtaagaagttgtgaagtcgtagagatatttcttaagcctttctccatatagggaaaggcttttttattataaataaatcaaggtagaggcgtggataaagcgctctacgaacaaaaaataggaaagagatgaagaatccgttaagaagctcatttagcaccgaaggtcgtaggatggccggagcccgtgcgctatggcgtgccaacgggatgaaagaggaacagttcggcaagcctattatcgctatcgtaaattcatttacccagttcgtgccggggcatacgcatttgcatgagatcgggcaactggtcaaggccgagatcgagaaacaaggttgtttcgccgctgaatttaatacgatcgctatcgatgacggtatcgctatggggcacgatgggatgctttactcgcttccttcacgcgacattatcgcggacagcgtggaatatatggtaaatgcccataaggcggacgctatggtttgcatcagcaattgcgataagatcacgccgggtatgcttatggcttccatgcgattaaatatcccgacggtgttcgtgtccggtggcccgatggaggcaggtgagctggatggccgccatctggatttgatcgacgcgatgattgagtccgccgatacatcggtaagcgatgagcgtatcgagcaggtggaacgccatgcgtgtccgggttgcggttgttgttccggtatgtttaccgctaactctatgaactgcttgaacgaggcgatcggtctggcgcttccggggaacgggacgatcgtggctacccataagaaccgtatccaacttttccgtgacgcggctaagcaaatcgttgagaacgcttacaaatactatcgtgacggggatgattccgtgttacctcgcaacatcgctacccgtcaggctttcttgaacgccatgtcgctggatatcgccatgggggggtctaccaatacggtgcttcacttattggccgtggcacaagaagccggcgccgattttcatatggaggatatcgatatgttatcccgcaagacaccttgcctgtgtaaggtagccccgaatacgcacacttatcatgtacaagacgtaaaccgtgccggtggaatcctcggtatcatgaacgagttgatgaaagccgggcttgtggatggcagcacgagacgtgcggacggcctgaccttggccgaggctgttgataaatacgccgtcacttccccgaacgtaacggaggaggcgatccgtaaatacaagagcgctcccgctcatcggttcagtatccagatgggttcccaagaatcttattataaggaattagatacggatcgtgccgaaggttgtatccgtgacgtggagcacgcttattccaaggatggcggcttggctgttttgagagggaatatcgccttggacggatgtgtcgtaaaaaccgccggcgtggatgagagtatttggaaattctccggcccggcgaaagtcttcgattcacaggatgccgcttgcgagggcattttaggaggtaaggtcgtttcaggcgatgtggtcgtcatcacgtatgagggtccgaaaggagggccgggaatgcaagagatgttatatcctacctcttatataaagagccgtcacttaggtaaggagtgcgccttgatcacggatggtcgtttcagtggcggtacgtccggtctttctatcgggcatatttctcctgaggctgcttccggtggcgctatcggattggtgagagacggggatatcatcgagatcaatatcccggaacgttccatcaacgtgcggctgagcgacgaggagttggccgagcgccgtaaagcggaagaggcgcgtggaaagaaagcctttacgccgccgatgcgtcagcgtgaggtatcgaaagcgttgagagcgtacgggaagatggttagctccgccgataagggaggtgtaaggattgttgaagattaaagccaataatatacattaaacacgttatttcttatggagaaacaaaagataaccggttcggaagctttgctgaaagcgttgattgctgaaggagtagatactatcttcggttatcccggcggacaggcgatacctatttacgacagtttatatgattatagggaccagttgaggcatgtattggtgcgccacgagcaaggcgctacccatgcggctcaaggctatgctcgtgtatccggcaaggtaggagtgacgttggttacttccggcccgggcgctacgaataccatcacgggtatcgctgatgcgctgatggatagtacgccaatggtcgtaatcgccggtcaagtaccctcgccgttgttgggaaccgatgcttttcaggaagtcgacgtgattggcatcacgcaaccgatcacgaaatgggcttatcaaatccgcaagccggaggagatcgcatgggctgtttctcgtgctttttatatcgcttctacaggccgtccgggtccagttgtgctggatttagcgaaggacgcgcaagtagggctggtggactatgaatataagaaggtagattacgtacgtagttatcagccggagccggatatcaaaaaggatcgtatcaaggccgccgccgatttaatcaatgaggcgaagaaacccttctgtctggtcgggcagggagtattgttaggcggtgcggaagaggaattgagagcgtttctccaaaagaatgatatacctgccggatctacggtattgggcttatctgcgttgccaaccgatttcccattgaacaagggaatgctcggtatgcatggaaacgtagggccgaaccggaaaacgaatgagtgtgatgtattgatcgctatcggtatgcgtttcgacgaccgtgtgactggcgatttaaagacatacgctaagcaagccaagattatccatctggatatcgacaactcggaaatcggtaagaacgtccccgtagatgtaaaggtgctgggtaatgccaagcacacgataccgatgatcacggcgttgttggaagaacgtaaacgtccggaatggaatgccgagttcgatcgggacgagaaagaggaatacgataaggtaatcgagaaggaattgtatccgaccgagggccaactgaaaatgggcgaggtagtccgtaaggtttccgaggcgaccggtaacgacgctgtattggtgaccgacgttgggcagaaccagatgatgggtgtccgctatttcaaatataaacaaacccgtagcgtggtgacttccggtggtttaggtacgatgggatttggtctgccggccgctatgggcgctaagttcggggctccagaccgtacggtctgcttctttaccggtgatgggggtatgcagatgacgattcaggaattgggtaccatcatgcaggagaaactgaacgtgaagattattattcttaataataacttcttaggtatggtacgtcagtggcaagaattgttcttccacgagcgttattcaaacaccatcatggagaatccggatttcgtggcgatcgctaaagcctatggtatcgccagccgtgccgttgaaaagcgggaggaattggacgacgctatcgccgagatgctaaaccacgacggcgcttacgtgttggtcgctaacgtggagacttgcggaatggtgtatccgatggttcctgccgggggaagcgtgacaaacatgattatgggagacgagaaataaggaggagatgaagctatgacaacaaagaaattatataccgttattatcttttcagagaatatcgtaggtcttttgaaccagataacgattatctttacacgccgacagctgaacatcgagactctgtccgtctctccgtccgctatcaagggcatccataagtttacgatcacgacattcgccgatgaggatatgatcgataaggtggtgaaacagatcgataaacgtgtggatattttgaaggcttattataatacggatgaggatctggtttatcaagagatcgctctttataagctaagtaccgagcttttcatcaagatgggaaccgtggagggattgatccgtaaatacaacgcccgtatcttggagatgaacgagacctgcgtggtattggagaagagtggccactatgacgagacacaggccttgttcaatgagttgagcgagacgatcggtgtcctgcaattcatccgctccggacgtgtggctatcacgaagagcaaggtggagcgcttgagcgatatgttggccgatatggagcgaaagttacaggaaaagcaacaataataagatatggagaaagtaggattatttcatttcgtggcggagccatatttgatggattttaggggacgtgtaacgctccctatgattggtaactatttgattcacgccgcttccagccatgccggagagcgtgggttcggtttcaatgatatgtcggagcgtcatacggcttgggtgttgtcccgtctggctatcgagatgaaggaatatcctaccgccttcgataagattaatttatacacttggatcgatgaggtcggacgcctcttcaccagtcgttgttttgagctggcggatgagaatgggaaaacctttggattcgcccgttctatctgggcggctatcgatgtggagacccgccgtcctaccttattggatatagaggcattgggcaaatatatcgacgagcgtccgtgcccgatcgagaagccgggcaagatcatgccggcggagaataaggcggagggaatcccgtattcgatcaaatacagcgacttggatatcaacggtcacttcaatagcgtgaagtatatcgagcacctgctggatttgttcgatatcgaccagttcaagacccgtgagatcggccgtctggagatcgcctaccaatccgagggcaaacaaggtatgccgcttacgcttcataaggcggagtccgctcccgataagcaagacatggctatttgccatgagggaaaggcgatctgtcgtgcggcggttacttggagataataaaagagatacataaataggtttttaaacattaatagttaaaaagaaaatggcacaaatgaattttggcggtgttgtagagaatgtaatgacccgcgaggaatttccgttggaaaaggcaagagagatattaaaagatgagacaatcgctgttatcggctatggcgtacagggaccgggacagtcattgaaccttcgtgacaatggtttcaacgtaatcgttggccagcgccaaggtaagacttacgagaaagcggttgaggacggatgggttccgggtgagactctgttcggtatcgaagaggcttgcgacaaggccacgatcatcatgtgcttgttgtccgacgctgccgtaatgtctgtatggcctacgatgaagccttatttgacagctggcaaggccctgtatttctctcatggtttcgcgatcacttggaacgatcgtacgggcgttgttcctcccgcggatattgacgtgatcatggtcgctccgaaggggtctggtacgtctttgcgttccatgttccttgagggtcgtggcttgaactcttctttcgctatctatcaagacgctactggcaaggcgatggatcgtacgttggcgttgggtatcggtatcggttccggctacttgttcgagacgactttcatccgtgaggctacttccgatttgactggtgagcgtggttccttgatgggcgctatccaaggtttgttgttggcccagtatgaggtattgcgcgagaatggacatactccttccgaggctttcaacgagacggtcgaggagttgactcaatccttgatgcctttattcgccaagaatggtatggactggatgtacgctaactgctctactaccgcccagcgtggcgctttggactggatgggtccgttccacgacgcaatcaagccggttgtcgagaaattgtacgcaaacgtaaaatgcggtaacgaggctcagatctctatcgactcaaactctaagccggattatcgtgagaaattggaggctgaattgaaggcattgcgcgagagcgagatgtggcagacagctgttactgtacgcaagcttcgtccggagaacaactaatccaatcttaatccttatatatcagcaaaaagaggcgggtcacttacgggtggctcgcctttttctgtttctctgcatcattcgatgtggatattcctagcctgtttgatctttcgcatgctggatgcggaatggacgatgtctagcacttcgatacgctcctcggtgatgcggtagatgataaggtgtgaatccaggatgatgttccggtacatgcggcttttcgtagctaggtgtcggcattcgggataataaggatagtcgttttccagtttctcgactgtattcaatatgtgctcaagatatttccgggcttggaatatgccgaatcgttctataccttccacgaaaatcctctcaaggctttcctcgtaaatgggagaaccgattacttttttccttgatagttgtccatccatgatcttattctttgatgtacttcttcaataggatagaacggccccttctcgatctcatggatatgttcccatatctcctcttgtgtgaattgtaccggcttggtgggatcccacttggactttgcgggttcggtcttggccttacgtgttcttgcggtcttggccgtggtttccttggcggggatgttgcttaattttgtcatagtcgtaactgttatttattagtacagtggcaaatgtatggaataatttccatgtaataagatatttgataaggaaaaaagtaggtctataggattaactcattacccagttgtagagacggggcgtgccccgtctccatcccctcaaaatggtattcgaatttatttatgtcacataaccgctatttttaatcgcttatccgctatatacgcacaataagcatgaatttgggagggtggggtgtgtaggtctttattacatatttttttatttcttatatttactacgtcttatacattaaaagagtatatgaaaatcatatgatgatgtgtgatagatatatgatgttaaccttttttatcagtatgcgcttggtgaatcggaataattgtctagcaagcaagcaagcaagcaagcaagcaagcaagcaagcaagctaacccagatctattatatgtatacgccgggccagtatgcggaggatttcctccgcataccggcccggcgtgtttgcgctcggcgcatgggaaaaaggccatcctacgaatacgacacgctaagtcgggaatggtgagagataccgatacgtattatgaatacaaaacacctatttataaatttattgcttatgaaaacaattttacgaggaattagtatgaggttgtcgctcattgcgatggtcttatgtttatgcgccgcatggccggggcatggactggcttggggtatggccgggtcggcgagcctggcggggatgacacccggggctccgcagagccaggcggaaggggaggtacggtttaccagtactctggatcctgtagcttattgctttatctacgagtggaatccggtggctacttggagcttaaatttcaatatcgagaacttcacgaaaggcatggctatacgtgtacagctggtgaacaccgctaatccggacggggtagagttccgctttgaggattctgagccggcgcaaacgttagacaatggcggcttttggataccggacgagaagttgacggactatggatatagcgttgggcttcgtctgcaaatgaatagctcgaaggggtgcgaggctggctataccgtgaaagtgtacagctcgcaagacataagcacggctgctttggcctctaccgggcagacgatacggtttatgctgagtgataaggctcctgctatgggggagttgtcgcgtacatccggcgatctgaacgaggatatcccttttgcgatcaacgtgacgaaggctggtttcctgcaggggcaacacgctaagatgaagatttatctgaatggcccttctgaaggcttgaccctttccgggcagaacctaagtaaagagactggtctatataatgagcctatatacgtattagatattccttcgttctccgctacgcaattcacgttgatggctcatgccacggaggaatggagcggaacggttcaagtggatatttgtgatgcggacggcaatgaggttgcatatggcggccgagcatcgttcgctttcccggccaataactcgcaggacgatatcgccgccttgaaagcgatcgccgaggccaacccgctgaactcggacttgcagaacttcatctccagcaaggattacttgaaagaccggacgcagagcgatggctacaacgtgggcgtgacgtggaacgccgagtccccgagccgggtgaaaagcttctttataaaggattatagaacacatacggtatctgacatgaaggatataggctcgttgagtggattggaagacttacggttgactggcactcggttgaaatctcttgatctgtctgctttgacaaagctaaggcaactgaatatggatgataacgattcgcttacatggttcacggtgaagctcccgagtccattacctgagtatttcaatctttatggttctactagggtcatagccggtacgccagtagacgattataacgcttatgccgcgaagggcgaggagatcgatctatccgcttacgctacggtgggtggcgtgaaatcgatctacacttggttccttaacgatcgaactactggtaaacggacggaagcgaccatgccgatggtctctggcaaggagggggctttcgtgtttagcggaaagccgggcgaatattatatatgtgagattacgaactcgaattacgacaattggcgtatgtatacgccccagatcaaggtagcccgtaactcggacagctactcccccgcggacatcgccggattgaagaagctggctaccgataacccgaatatcacccaattgcaggagttcgtggaaagcaagggctgggagcgcgagaattggaactcatatcaagacgtgatccgtacggactggaacaccgacgaggtcggtcgcttaacgcatctggcgattgagttagattggaactctaaggatacgatctctcaattagacttgagcgccttcactgagttgaagtatttcgagtgcgaggaatttatgaatatagagaagctggacgtatcgaaaaatacgaaactggagcacttgcatatatatagcaggaacttagcttcacttgacctgtccaaatgcccggaactgcaatattttagatttggaacattatacataggcgagggaagttaccagaacacgaagctagcgacactgaatcttaccggttgttcgaagctgacggagctttaccttgagcattcgcccttggcttcgctggatatctcatccttcaagcaattgagccgtctggagatcgagtactgcccgaacttgaagttgcaaggtttcgataaggctacgagcttgacctatttggccttgccgcatacagaacagttcgcggatctggtaaagaacctgccggcgtttatccgtcatctatatctgcaaaatacggagtatgagcttccttccgcgcaagtgggaaagaatctggagtcgttgggattgccgggatacgtggagagtctcgatctggctcagtacccgaacttgagtaacttgaatgcggatggatctcttttgagatattctacggtgaagaactaccggcagataaattataatggtttggggcacataacgcttacttccccctctcatccgggagatccatactggttcgagaacggcgatacgatcgatctctcctcggaggccgtgatcgatggcatagagaccgtattcctatgggtaaacgccaaatataggacagaggagaaagaggcattgaagccggtgccaaaccgtccgggcgtattcgtgctggacagcaaggaggaaaagtatggagactattattgtaagctgatgaacccgaagttctgtaagatctcggagattaatgtacgtgacggctggcagatcgagacttcatacttccacgtggagaccaccgtcccccaagtattcgccgagagcgacgtggctaccttggcacgtatcgtagacgcttccaacaacaaggcattgagcgagtggtggagcagcgacgcatggaagacaaacgagggctcactgtatgcgcaagccgtttggaacgacgagaacccgcgccgcttgatacatttatatatgtatgagatgggcgaaagctttacgaagaaggtagatctcgctgccttggataagctggagatcttgtcgttgacaggcaatagggtggaggaactgaccttgccgaagaacaatacggtattgcgttctttgatgctgggtggaaactattctttgaaatctttgatcgtatccgagtatccatcgctggagtatctggatgtgtctagtacggacttgacggctctcgacttgtctaagaacaaaaacttgaaggagttgttcttgaattggacgatgcttgacggggtagagaacagcgcttcggcttcgggccttgccgctcaattaaccgcatatggcttgcctatacccactacccggatcgatttggcggacttcccggccttgatgtctttcaatgccgatggttcgtgcttggagttcgctaacgtggagaacccgcggcaattggaggctgccttcggtgttgttaggttgccggtaggtgaggttcgtccgggaggtttcgtggcttatggggagacaatcgatctttcctcacaaaagatggtaggtacatccgcctctcgctttacttgggtattcgacggcgatacgatcgaccatacggacagccgctatacgattaccgaagacttgaccccgaattatcaaattgccggtcttgtaaccaatccattattccccggctggacggttcagtacgatgcgtgggtttacacctgcgatggcgatgcgaacttcgacatgctggtaaacgtacaagacgtgaccgctaccgtaagctacatcttgcgggacaaggataacatgatccccaacttcggttttgccgaggcggatgtgaactataataataatgtagagatcgctgatgtaatcggtatcgtcaacctcatccacggcaagccggttaccaaggccagtgcattgcgttctgaggccgaggttcccgtacaaatggagctcgacgctgataacttcttgacgatgaatagccaagtaccggtagccggtatctatctggagttggtgggagccatcgacgagatcccgttgctgggcgatgccgccaagttcctccaggcttccagcttgaacggagataccttgcgtgtgatagcttatagcttggatggccgcacgattccttcgggcaagagccgtatcctgcgtatgccggcgggcgttaccttggtaggagcctccttctccgatgcgaaggccaacagcttgaggtctggtggcgatgcgatcgtgacttccaacgccccgatcgaggcgatcagccaattggcagccgtgtccaattatccgaacccgttccgtggcagcacgaccttccgttatcagttgacggaggcggccaaatccgtgacgatccacgtattctctgcgaatggcgctttggccgtggtattgaacggtctgcccggcgaagtgggcgataaccaatattcggcggctcttaccttaccggcgggcgtttactattaccgcttgacggcaaagacaggccatggtgtgaaggcaagtaatactaacatctttatctgtaagtaaattatgaaagtgaatcatataaaacaattattcgtagccctctccctgctgttatcggcgggaacggctactgccgcccagtggaaattggcgaagacgaacctgaacgccgctggcagtaaggatacgctcacgctggaggtatccggcaattcctttagtttttcctccttccaggtggatttcaccttgtccgagggtatcttgctagatggaaccccgatcctcggcgagttggcaaatgatcatgctcttacgtggagtaagcaaagtgacggcagcttccgttgcgtggtatacagtgcaggaaacaaggatatgaaagccccggaaggccctgtgctccgtatcccggtagtgctggcggcctcttttgagggaggaaagttcacggcgaaaaacggactcttgtctaacaaggcctccaatgggcagtcggtgaaggacttgagtggagcgacccttacagcgtataaggaaagagcccatctggtggtgaacgtatcgggccaagagcaagtggtcaacccggctatagccgcaggattgagctatacgaccatcccggaggataagacgcttacggtcgcttattttaaggatgattcttgtaaaatagcggctaccgacaatgaccgcaaggaagagggtatcctgtatgtcaagctatcctatgcgggtgacactgactacgctgagttcgaggaggtctatgtcatgagtctgacgagcaagatcgctattgacgcaagtaaaatcacgaagccgcaaacgacaggtatcaaggaggggcaattgctttcaacttctttactgtccggtggtagcgtaaaggatgaagatggatatacgattgccggtaccttcgtttggacgaacgggaatgcggtgatgccggccgggaagcaaagctgttccgtcactttctatccggataactcctcttattacaatacagcggaggtgtctgtggaggttgaggtaacccctacgtatctagtcaccgctacagggacaacaggaggtaccgtaaacgtattgggcaagaccgaggatgacgtgtacgtgaagggtcaagagatctccttggtagccctgtctctgcccaattataagttcgagagttggtcggtaacgggcgcgagcgagaccttgccggcgaatgattccatctttgttaaggcggataataataagacctatacggcgaacttctccccgatcatgcgtgcggtaacgatcaatcatgtaggcaacggcagtctctcggttacggccgaaggtgcgaaggttgcgtctggagctttcttgcgacaaggtacgatcttgcaaatcgtggctacaccggacgtgaactcccagttggaatcattgactataaacaagaagcctctagagggtaacaaggtgacgcttacagcggatttggaggtcaatgccgcattcaagccaaaagagggggcacttgtctccatcgataaagatgtggcgaacggctctatcttattatataaggaagacggcagtttgatcgcttacggttcttccgttcctgttggtacgaagctacgtgcggttgcgcttccggatgccgggtatagcttggatggcagtgtcaccttatcgggcgtgaccggccctacgaacgacctgtggaccgtgacaggcgatgttacggcaaaagctgctttcggtgcgaagaaatacatggtgaaggcctctgccgtaagcagcaacccgactcagaccgcttccggtacgatcacgttggagccatccggagaacaaccttatggtacggaggttcgtatagcgagtgccgagggacagaacggagcgagactgcttaccatcttggcgaacggtaaggaaatatctcaaaatgatgtcttgaccgtaaccggcgacctgacggtgacagctgtattcgatcctcgggtaaatatcgagaagacatacatcctttggccgtatcaagaatactactacagtggcgtatcccgcaacttcgtgcctttcgcttcgcagacttacgctggtttctcttttgaggtcttatataagaacactaagggtgagaagactgctaaggcaatcgatgcggacaattatacggtcttgttgcatcgcgaagaggatggtttgtataatgagttcaaaggggagtataaggatggcttagtgatccataagtccaaggtctcggtaacggaagcgcctacgaacggaggtaatccgaagactcgcccggcagaggtggacatcacaagcacaactaccaatggcgtgacaaaatacgtgattgagcctaacagcgatgcggctaaaaagaattacgaaggcacggtttactatcattctacgaaagatccggtaaacttatcctttggtgagtctatcctacgtgcgggaggggaaccggtatcaccgatgggctacgtacgtgtcactaatggcggtatgccatacgacgcaacggatggtaaggtttctatccccgccggtataacggtgacgctggaagctgtgcctgcggaaggcgctaagttctctcattggtctgatattgagtctaaccctgttgacgcaaagaagaaccctcgggaatatgtggtagcggaaggctctacgggggttactcctgaatttgtcggcaaggataaactagagttcaagttagctcaaacctcttccgtatataacggtgcggctcaactcgtatccgtgacaggtacgggcaacgaggcttgccagatcacgttcttctttgacgaggcctgtacgcaaccggctgtcttgaagaatgtcgataagtattatgtacgtgtttatcgttcagctgatgcgaagtataaagaatatactgaagtattcccctatgcgatagaacaagccgaacctgcgattacgaagtggccggatgcttccgatatcttgctcggtcatacactggccgaatcaattctacaaggtggaaatcccggtatcgtagccggaacattcgcttggagcaagccggaaacagcgcctacggccaccggtcagcaagaggttacctttacgccgaccgatccgaattacaagccggttagtagcaagatagaggtgaaggttgtttccgctactttcttggatccggttactcctcctgtagaccccgtagatccggagaatccagacaagccggaccaaccggatacgccaaccggcatcgagtccatcgaggaaggcatgagcctgtatacagccaatcaatctatcttcgtgaatatgcctcagcaggtagccttgaaggtagtcgatgtgtccggcatcgttctttacgaaggttcgattcttggcaaggctgagatcccggtagggcatgccggagtctacttcgtccgctgcgaggccttcggcgattcgtttgtacggaaagtcgtggttcgctgattctgccactgcccatcgtaaggtgcttatgatgggcattgtaaacaccttatactgcccatcgtaacaaccttacgatgggcagtgttatttcgtaaggtatacgatcgtttggcttacggtttataataaataataagtaaaaaacttcggattatatttgctggtctcgaaaaaggccgtatctttgcaacgttgaaacaaaaacaataaagacaagaacaatgacacgcaacttgcaaaatagtctcattatttctctaaacattattctactctgggaacgggataggaagtgagactgtatgctttgcgagcattacgatatatgaaagagcctttctcacttccttgtgagagaggcttttttagttagtataggatattagtaaattaagaatataagattatgtcagacagattatttattttcgacaccaccttacgtgatggtgaacaggttccgggatgccagttgaatacagtggaaaagattcaagtagctaaggcgttggaacagctaggtgttgatgtgatcgaggctggtttccctgtctccagtcctggggattttaagagtgtggttgagatctcaaaggccgtgacttggccgaccatctgtgccttgacccgtgcggtggagaaagatatcgacgtggcagctgaggcgttgaaattcgctaagcgaggacgtattcatacgggtatcggtacttctgattctcatatcaaatacaagtttaactccacgagagaggagattatagagcgtgcgatcgccgccacgaaatacgctaaaaagtacgtggaggacgtagaattctactgtgaggatgccgggcgtacggataatgaatatctagcccgtgtcgtggaggccgtgatcaaggccggggctaccgtagtgaatatcccggatacgacaggatattgtttgccagatgagtacggggcgaagattaagtatctgatggaacatgtggatggcgtacataacgctattctttccactcattgccataatgacttgggtatggctaccgcgaataccgtacaaggcgtgttgaacggagcccgtcaggtggaggtaaccgtaaacggtatcggtgagcgtgcgggtaacacgtcattggaagaagtcgccatggttttcaagagccataaagaacgtgatatcatcaccaatatcacgacgaataagatctatagtacgagccgtatggtttctagcttgatgaatatgccggtacaaccgaataaggctattgtcggacgtaacgcattcgctcactcctccggtatccaccaagatggcgttttgaagaatgcgcaaacctacgagatcatcgatccgaaggatgtgggtatcgatgataatgcaatcgtattgactgctcgtagtggtcgtgcggcgttgaagcatcgcttgcatgttttaggtgtggatctggagcaggagaaattggacaaggtgtatgatgagttcttgaaactggccgatcgtaagaaagatattaatgatgatgatgttttgatgttggtcggaaaggatcgtacggccacacaccgtattaaattggaatatttacaggtaactagtggtgttggagtacaatcagtcgcaagtatttgtttaaatttgtcgggagtaagaaaatacgaggccgcggctggtaacggtccggttgacgcaggcatcaaggcggtgaaaaaagcgattagtaatagtgacatgacgattcaggaattcttgattcaagccattaataaaggtagcgatgatacgggcaaggtacatatgcaggtagagtataacggggctacgtattatgggttctccgcgaataccgatattatcgccgcttccgtggaggctttcgtggacgccatcaataagtttatagtagactaaaaatagacaagacaatgagcaagacattatttgagaaaatctgggacaaacacgtggtggacacgttgcccgacggaaccatacaattgtatatcgaccgtctgtattgtcatgaggtgactagcccgcaggctttcgccggattacgtgcacgtggattgaagcccttccgtcccgcgcaaatcacttgtatgccggaccacaatatcccgacattgaaccaagataagcctatcgaggaccctatatccaagaatcaagtggataccttggaagagaacgcgaagtatttcggcttgacgtattacggtcttcaacatccgaagaatggtatcatccatgtggtaggtccggagacaggcttgacgcagccgggtatgacgatcgtttgtggcgactcccatacttctacgcacggtgccatgggcgctatcgccttcggtatcggtacgagcgaggtggagatgaccttggctacccaatgtatcatgcagcgtaagccgaaaacgatgcgtatcacgatcgatggtgtacgcaaaccgggcgttacggcgaaggactttgctttatacattattagtaagatgagtaccagcggtgctacgggctatttcgtagagtacgctggcgaggcgattcgtaatacgaccatggaggaacgtctgacgatctgtaacctttctatcgagatgggtgcccgtggcggtatgatcgctccggatgatgttactttcgattatttgaaagaccgtgagtttgccccaagaggcgaggaatgggagcggaaggtgagcgagtggcgtcagctatatagtgatccggacgctaagttcgataaggagatcgtttttcacgccgaggatatcgacccgatggttacgtacggtacgaacccgggcatgggtatgagtatcagcaaagatatcccctccttagaaagcgtgcccgaggcaggccgtatttcttataagaagtctttggattatatgggcttcaaggcaggcgagtctatgttgggtaagaaagtggattatgtctttttaggtagctgtacgaatggccgtatcgaggatttccgtgctttcgcctctttggtgaaaggaaagaagaaagcggatgatgtaacggtttggctggttcccggcagttggcaggtagagcgggagattcgtgccgaggggatcgacaaggttttggccgaggccggcttcgtccttcgtcaaccgggatgttccgcttgtctggcgatgaatgaggataaggttccggcgggtaaatatgcggtctccacttccaaccgtaatttcgagggccgccaaggaccgggtgcgcgcaccatcttagcggggccgcttgtggccgccgccgccgctgtgacaggtaagatcacggacccgagagaactgatgtaaagactaatctaataaagtagcataagatgaaaacaaaattcaatataatcacaagcacttgcgtacctcttcctttagagaacgtggataccgaccagattatcccagcccgctttctgaaagcgactaccaaagaagggttcggcgagaacttattccgggattggcgatatgataaggaaggtaataagatcgaatcattcgtcttgaacgatcctacgtatagcggaaagatattggtagcgggaaagaacttcggttccggttccagccgtgagcatgcggcttgggcgatcgccgattacggtttccgtgtcgtggtctccagtttcttcgccgatatccataaaaacaacgagttgaacaacttcgtgctgccggttgttgtgactgaagagttcctcgctgaattgttcgattcgatttacaaggacccgaaaactgaggtcgaggtaaatctaccggagcaaacgatcacgaacaaggctacgggcaaaagcgagcatttcgagatcaacgcctataaaaaggattgcctgatcaacggattggacgatatcgactatttactggcaaataaatcaaagatagaagccttcgaggcagcacgctgattatgatagaaataatggatacaaccctcagagatggggagcaaacttcgggcgtctccttcgccgctcacgagaagcttagcatagcgcaagtgctgctgaacgacttaggcgtgaaccgggtggagatcgcctccgcccgtgtgtcggacggagagtttgaggccgtgaagcgtgtagccgcttgggccgcccgttccggaaacctagacaaattggaggtcttgggtttcgtggatggtacggtctctctcgactggattgaatccgcaggttgccgtgtcgtgaacttgctttgcaagggctcttataagcatgtcaccgaacagcttcgaaagactcccgagcaacacgttgacgatattcgtacggtcgtattggaagcggcgaaacggaagatcgacgtgaatatctatttggaggactggtcgaacggtatcaagcattccccggattacgtattcttggtaatcgatgcgttgaaaggacttccgatctgccgtttcatgctcccggataccttgggagtcttgaatcccggaaatacctacgagtattgcaagatgatggtggaccgttaccctgatttacggtttgacttccatgcgcataacgactatgatcttgccgtagcgaatgtatattccgccatccgtgcgggtatcaagggaatccatacgaccgtgaacggtttgggagagcgtgcgggtaatgctccattgagcagcgtccttgccgtcatcaaggatcagttgggagaggagacgaacttgagggaggaaaagataaacaaggccagtcgtttggtcgagacctattcgggggtgcatatcccgcccaataagccgattatcggagagcatgtgtttacgcaatgcgccggtgtccatgcggacggtgatagcaagaacaacctgtattgcaacgacctgcttcctgagcgtttcggacgggttcgcgagtacgccttgggcaagacctccggaaaagcgaatatccgcaagaatctggaagcgctcggtatcgacatggatgagggctcgatgcgtaaggttacggaacggatcattgagttaggggataagaaagaaatggttaccccggaggatcttccttatattatcagcgatgtgcttcatcatgataatgcgctggaggatcagaaaatacggatcttgaactattccttatccttggcccaagggctgaaaccggtggctaccttgaagatcgagatcaatggcgaggcttacgaggaatcggcttccggtgatggccaatacgacgctttcgttcgtgccctacgccggatttattcccgtttgaaccgcccgttcccgatgttgacgaactattcggtatccatcccgccgggaggacgtacggatgcgttcgtgcagacggtcatcagctggaattatgccggggtcgatttcaagactcgtggtctggacgctgatcagactgaggcggcgatcaaggcgacattgaagatgctgaacaagatagaggattaataattaaaaaggtaaagggtatgaaaaagttgactatcgcgcttgtagcgcacgacaatcgtaaggcggaaatggtagaatgggcggtacataacgctgagttcttgtctcaccaccatattgtttgtacgggtacgaccggaaatttggttcgtaaagctctcgaggaaaaaggggtgaacgcggatattgcttgcatgcattccggtccgatgggaggcgatgctgagattgccgctatggttgtccgtaaggagatcgatttggcggtctttttgatagacgacttgaatccgcaaccgcacgaggccgacatccagatgttgcttcgccagtgccgtgttcataacgtacctatcgcttgtaaccgttatagcgccgacttgatgattacaagtaccctgtgggatgatgacacgtatttccccacggagcctaagtatgtacattttaacagagaataataacaaacatttacgatgaaactgaatatagcagtacttcccggagacgggatcggaccagagatttccgtgcaaggcgtggaagtaatgagtgccgtttgtgagaaattcggacatgaggttcactatgagtatgccctttgtggcgctgacgcgatcgataaggtaggcgatcctttcccggaggagacctatcggatttgtaaggatgccgacgctgttcttttctcggccgtgggcgatcctaagtttgataatgatccgacagcgaaagtacgtccggagcaaggtcttttggcgatgcgtaagaagttgggcctgttcgctaatatccgtccggtgcagaccttcaaatgcctattgcataaatcgccgttgcgtgccgaattggtggatggcgcggatttcttatgtatccgtgagttgaccggtggtatgtatttcggtgagaaatatcaagacaacgataaggcatacgatacgaatatgtatacccgcccggaaatcgagcgtatcttgaaagtgggcttcgagtatgcgatgaaacggaataagcacctgacggttgttgacaaggcgaacgtacttgcctcttcccgtctatggcgccagatcgctcaagagatggctcctagctatccggaagtaacgacagactatatgtatgtggacaacgccgctatgcgtatgatccaagagccgaaattcttcgacgtgatggtaaccgagaatacgtttggtgatatcttgacggatgagggttcttgcatcagcggctctatgggcttgctgccttccgcttctaccggagagagcacaccggttttcgagccgattcatggctcttggccgcaggcgaaagggctgaatattgcgaaccccttggcgcaaattctttcagtagcgatgttattcgagtatttcgacctcaaagaagagggagccttgatccgtgaagccgtagacgcttccctcgacgcgaatgtccgtacgccggaaatccaagtggaaggtggagcgaaatatggaacgaaagaagtgggtagttgggttgtcaattatatcacggaaaagtagtataaatgggccgatttcgcaccagtagtggcgcaggctcacacgtatagtggcatcggctcacgcgagtagtggcgtaggccaataccactactcgcgtgagccgatgccactatacgtataaaaacagccttaacgagccatcttcatcaactcgtcgatagtcgttttatcatatcccatatcctcagctttcttgaagtctaaggcggccgatgccttctcatattgggcgagttttactttgcctcgcaatacatataaagcggctgtcggggtactttccacgaaaacacgattgatatcggccatagcccgggcgttcttgcccatcatgaaatatagatcggcacggccctcgtataatatccattcacggggcatctcgctgatcaagtaattaaagatgcgttcgctctcatcgtaattcccccgtagcttttcgagaattgcgtgtcccagacgtcctttcacggatttctcgtttacttccagtatcttatcgaaatcctgctcggccaaaagatagttcttatgttgcaaatgaagcattgccctgcaatataacgcctcttgatgatgggggttcaagattaacagggcattgtaatcgttcgtcgctttttcgatctcacccatttccgtatataagccggcacgattttccagtatggcctcattattcggatggcggcttagggcggcggtataggagagaagggcatcttccagtttcccttgcctgcgctgtatcgtcccgagattcataagcaaggcgtagttgttggggtttcccggttcgaggtgcatggcggctcgtaggctctcttcggcggagactaagtcgttcttgtccaagaagtcaaaacttttctcgacaaacttctcgtatgtctgagcgtggccatagcctattgaaaggaaaagggcggcgagtatcgcaaggattttcatgctgtcgtatttaacgtgttatttgattgatgcaaagctacgtaattatttcatggttttaccagattaaaaaaactttatacctttgctacatttcataatatttttggaagatcagattgttatataattaatagattaactaaaatagaagagatatggtattattagcagctgtagaagcgagttctaaattagaggaagctatcagatccttggttgagcatggctcccaattgggttttacgattattaaagcccttattgtctttttggtgggacgattggttataaacttactaaataaactggttcggaagatattgagcaaacgggatatcgatccttctgtcaagacttttgtgggtagtttggtgaatgtcagtttaaccattttattgattatttcagtcgtaggggcgttaggcgttcaaactacatcgtttgccgccttgttggcttccgccggtgtcgctgtcggtatggcattgagcggtaacctgtcaaactttgccggtggattgatcatccttcttttcaagccttataaggtgggtgattatattgaggcgcagggcgttggcggtaccgtgaaagaggtccagatgttccataccgtattaggtacggttgataataaggtcatttatataccgaacggctctttgagcagtggcgttgtgactaatttcagtaaccagacgactcgccgtgtagactggacctttggcgtggaatacggcagcgattatgagaaagtaaagcaagtgatagagtctgtattagcgaaggattcccgcatcttgtccgagccggccgctccgtttatcgccttgacagccttggcggacagcagcgtaaacgtggtggtacgtgtttgggtaaatagttcagactattggggcgtgtatttcgatattaacaagaatatctacgcgaccttcaatgaggtaggtatcggtttcccattcccgcaactaaccgtacaccaagcgaaggattgaagttcgtgataatctatgacttgtccttaaaaggaatctttttgttcaaaaatctttgagtttcgttagatgagcggttattttatagatggttgaacaaaaagatttatctttgtgaatcgcaaattagagattagacacagagtgtatatgatattacggaactttattttattactttagtatttttatttgattatatttaagtagaatgatttaaggctcatccttatatagattaagggtgggcctcgtttttttatagtagtgtgtagagattccacactctcgtggggaaattttccacattccacggtttgttccacactttggcaaccgaatgattgattcttcgcttttggttaattgtcggatttacaacttgttattctcttgtcgttttttagggtgagttttggcacggagattgcaccctatactgcgaatttatgatgtaagagaaaaaaggtttaggtatttaggtttttaaggtatgaaaaagattgtttacggggctattgttgctttatgtggcttatttattgcccctgatgtagaagcgcaagccgggatggccggtagcgctaaggaaacagtggcacaggataaattttatccgatcgaggtaactgatatgccccaagtattgcgtgatgcggtaaatacttcctatgagggatgtatggtgaaatcagttgaggtgtcaaacaatagcacgtttgtgaagtataaggtagtattactttccagaaatggtaagatatataaggtttatttcgatgacagaggtcatgtcgtaaaagaacatgcttatttcgagtaagcctgtgaagatatttattgagtagattagatttccagccgttttgcctgtgaaggtggagcggtttttctccaaaatatatagtttcatgatattactatataaatacactgtttacatttttagtagtatagtcgtcctgttcgtgagaataggacgatttttgttataagacgctaaatcgattgttaatctcatacgccctcaaaaccttttctaaacaacccctgtttagactgtgattaataaataaaatctatttgattatggacaaaaaatgtactcttattgctgcggccctgatggttgcgggcgtattctcggctaatgctcagtcgagtacgaccgttccggaggctcagtggaaagccggtaactattattatttaaagacaggttcttccgttttgtctttaagtggtgagaaagccgactcagtaattgttaaaactttggcgtcagacgctaccaaagccgctattgattctgccttgtggcaaatcacgaatgcgggtacgactcctgctggtcctgtgtatcaattcaagaacaagaagacacaggccgttttgtcgtttgcggcttcatctacggcaaagcctgttatcacatcgggcgtgaatcagtggacattctctgacgctgccggtggtagcgctattcaggcttattacggaaacaatcaaatcttggcgttggatgtagttgggacagacttgagtttaggttcttctgcctcttctacgaaatttaccgtagaggctcctagcgacgctatgtatttgagcgcaagtgagctgggggatggtttccaagtctttcaattgacgtttggaggaaattatcaaggaaatatcttcgagggtaagaacttgatagcgaagaatacggcggctcccgctacaggcgctattgcgaacgctaaatatgtgaccttgcagatccaaggtgaccaagtatttagtgatggtaaagcaaaatacttaggtgtcgatacattgaagaatgtgatagccggtgctaccggtgtatatggggctaagtttacggctgactccacctatgacgctagtggcttgcatacactgggtaacgctgatttccagaaattctatttcacgatcaacttgaagaacgacgctttggctatgtatgccgctgccgctccgaccgtgaacgcaagtccgatgacctccgttccgaacgttcgtgtcgtatatgccagcgtgatcgagacgaaagccttgaccgtatctgacttgcagtcgggttctactcaacctgctcaaggagccgctcctgttattaccgtaacgaagggaactccttctacgatcgctacaggtacaggcgtatacttcttgaagagcgcgagcaagggcgataagggcggacaatacgctgtcgcttacgataagagtgccgcttccgataaattggtaactgcggcaggtttcaaaccttctatttatcaaccgaagggacaatggtatatcaaggaaaacaacggaatgtattcggttgtagaccgtaatacgaatacgactattatttctaacgaggagatcttcgccgttcaaggtatggccaatacctatacatttgggggtagcaccgattctattacggtggaatatcaagcgaatgtggatttaaaggataaattcttgggtactcgtcacttctctgcggaggaactcgccgataatggttatgtattgaacttgatctccggtactccgggtgtagacgatctgtatgcgtttacttctgattccgtattgatgattaaatccggtgacgcagcgaacgcagccgctcttcgtatcgtggttagccaagattccgtacagaatgtaacggatggtttaggtgcccgtgctttaggtgataccttgtatcatgcgacttatatgttgaaagaacgtttcagcaatgatttggttgccagcgagaatggcgggccgttgaaattatctgattataccgctccgttggaattcgtattcaatacggctacgaccggtggtaaataccagatggctaccactgtaggcgcaaccacccaatatgtctttatgaacgtgaatacggcgaacctgatcctttccgataaggttaactacttcgactttgtcgctgtagaggctccagagtacgcttctatcgacaattctcacaagcgtttcggtacgaatggtaagttcttgacgatgaatccgctgaatttcttcgccgaagtgaagaacgaaggccaagatatcttgaagtcaacttatgagactgacaacttctctttgtgggttcaagaagccgataccgtgatcgctggtaaaccgttgtatttcatcacgacatcgatctatacgccggagacaactaccaaagctgtttctcctcgctactatatggtatccttgcgggattctaacgagacattcgttagcaatggcgctacttactaccgtgtaggcttcagcgataaagcgaatatcgttccgtctttggataacaacgctttgttcgccttcaagacaactcaggatggtggttacttattggagaaccagaaagagctgaatcgcaccgtggccgcgggcgagttgaagactccttatgtaggtgtggtaaacaatgttgtggtaatgtctaatgttggcgttccattcacgatcgagaatgctccgactccggtttccaacgaacaattggaagaggttgccagcttcacggtaatcgctggcgaggctagcgttacggtcttgaacgcggcaggcaagatggttacattgtctaacatcttaggtcagaccaccgcttccgctatcgcttcttcagataacttcgtgatgccggcatcgaaaggtatcgtggtagtttccgttgatggcgagaccgctcagaaggtagtcgttaaatgatgaataactgatagtggatatcagtttgtatactaacaccgggattcctactgtatggtaggggtcccggtgctttgtttataggtaggccatttgtatggagggattctactcctccagtttattctttagataagcgattttcttctctgatttctctttcaaggtgttcatgctcttgatatcgcttaatacggtggcgaggttgaaggtgttgacgatcgctttcttgtcggcgtccgccatatatataatgtaaggcttgcctcccgtgtattccaccttgatccgctctttctcgttatcgtagatgaacttgacggcatcgacgcagtgctcccccttgtaggtcactacctccgtggtgcttcccatatccttgaagcggtaattcagtccgccgtcgtacgggatggaagcggtctcggcgaattggccgtctttcaggctcagcttgattcccgtatgctcgatggggcgtccgccgtaatatacgctggccagatacatctcgccctcctcgttcacgccgcaacgtacgtaacaacgttgcacgttgcgctcgatcgtctgctgtttccagatataattgccgatttcctcgtaaacggaatccttctcgaaagcgaagcctttcttcaatccctctacttcctccagcttgatagggagtaagctgtcgcagaaagcgatgttgcgctccgcctcctttacttctacttggcgcataagcgttaatccttgcttcagtacctttacttccttgggatagagcgcccggatactgtctatctcgttcttcgccccgaaaaactcgttattctcgtacatggcccgggccttgtccaaacgggcctgagccgctttctcgtctccgttacagcccgttaaaatggcggcaatgagcgttatacagatcgctaactttttcatatctttctcgttcaatgtatttgataccgcaaaagtacatgaaatttgattatctttgcgctctttattggatttggaatacataaatatgtatataaacgaggaagagatagtaaatcatatatccgcgaagcctttccatttgatatcggaggcggcggaagagctaggtgttgaggtatatgtaataggcggatatgtgcgggatattttcttgaaccgcccatccaaggatatagacgtggtagcggtaggcagcggtatcgagttggccaaacgagtggccaagaagatcgggcgtggcgcttatctttccgtcttcaagaatttcgggacggcgcaggtgaaagccggcgatctggagctggaattcgtgggggcaaggaaagaatcctacagccatgacagccgtaagcctgtcgtggaagacggcaccttggaggatgaccagaaccgccgcgatttcacgatcaacgccttggccctttgcctgaacaaggagcgttacggagaattggtcgatcccttcggcgggttggaggatatggacgagcttacgatccgtacgcctttagacccggatgttactttcagcgatgatccgctccggatgatgcgcgcggttcgtttcgccactcaattaggtttctttatcgatcccgataccttcgacgccatcatccgcaaccgggagcgtatctccatcatctccaaggagcgtatcgtggacgagttgaacaagatcgtcctctcgccaaagccctctatcggtttcgacttgctggataaatgcggactgttgccattgattttccccgagctttgcgccttgaaaggcgtggagaccaaggaggggatcgggcataaggataatttcgcccataccttgatggtgctggatcgtttgagcaagacttctgataatctatggctgcgttggagcgccctcttccacgatatcgccaagcctgccacgaagcgtttcgaccctcgcttgggatggacgttccataatcataattttatcggcgagcggatgatccccggtatttttaggaagatgaaactcccgatgaacgagaagatgaagtacgtgcagaagatggtaagcctgcatatgcgtccgatcgccttgtcggacgatgaggtgacggattcggcgatccgccgtctgctgttcgatgcgggagatgatatcgacgatttgatgaaactgtgcgaggccgatatcacgagcaagaacccggagaaggttcgccgtttcttgaacaatttccgaaaggtgcgtgagaagctggccgatatagaggaaaaagaccgtgtccgtaacttccagcctccggtatccggcgaggagatcatggagacgtttggcttggctccctccaagcctgtcggcgtgctgaaagaggcgatcaagaacgccatcctcgacggcgtgatcccgaacgagtatgaggcggcccggcagttcctaatacaacgtgcggagaagatggggctgaagccgattctgtgatccgggtatagtcacaaggcccagccgtacagttggcccagtcccctgtacgaagtactgcggtacttcctagagggtactgtagtacttcgtacagagtactacggtacttcgtgcacagtacactatctaagaatttaatcgctctaccgttttcacgccgtttaccgccttgatctttttcgtcagcaagtttaatgcggtcgtatctcttaccaatacggtaaagttaccttggaataatccgtctaccgagttgatgtttaaggagcgaagcgtgacgttcgattcctttccgatcacggaggtgatgttggtgacgatcgctatatcgtcccgtccgatcacccgcaacgtaaccgtatagccattgtctcccttgccgctccattttgcgcggatgatccggtaaccgaagcggctgaacatctcttgggcgttcgggcaatccatgcggtgtatcttgataccttgcgtggagacgaaaccgaaaacctcgtcgccataaatcgggttgcagcatttggcgagtttatattcgatacccgtcaggttcttgtcgatcaccaagacatccttgttcgtcgatatctcctccaccggagtcgtggtcacgaattcctccgcgctacgcacctcggtgcgctcgttcgtctccgtctccttgcggaaagcctccagatattcgtcgattacttggttgggatcgaggcgttcctcggcgatctcgatgtagaagtccgtgacggtcttgaatcctttcttcttgatatagcgcatcatggttggctcgtccatgtcgatcttccggttcttgaagcggcgctgcaacatctccttggcgaactccacggccttcacggtctcctccttcaaggcctgcttgatcttcacgcgggccttggaggtgacgacgaagttcagccaatcccgcttcgggctttgcgccggcgacgtgatcacggatacgctatcgccgttgttcaaggtgtatttgatcggtacgttcttcccgttcactttagccgatacgcatttgcttcccagcttcgtgtggatggcaaaggcgaaatcgaggaccgtcgctcccttggccagcttgataagctcgccggtaggcgtgaagacgtagatctcatccttatatagatccatcttgaaatcctgcatcaagtcgagcggattattctccttggcctccaaggcggcacgtacggtattcaagaactcgtctagcccgctctccgctttcacgcccttgtatttccaatgcgccgccaggcctcgctcggcgatctcatccatccgcttcgtacggatctgcacctccacccatttattttgcgggcccatcaccgtgatgtgcaagctctcgtaaccgttggtcttcgggatggagatccagtccttcatacgcttcgggttgggctggtacatatcggtgacgatggagtagacttgccagcattccgagcgttccttctccagcggcgtatccaatacgatccggatagcgaaaagatcgtagataccctcgaattccacctgctgctttttcagcttgttattaatggaatgtatggatttggtacgccccttgatatcgaacttgaatcctgccgctgccagcttccgcttgatcggggcgatgaactcggcgatataagcgtcacgggaacgtttcgtctcattcagtttccgtttgatgaagtcatactgtttcctgtccgtgtatttcagggaaaggtcttccagctcgctcttgatcgtatataagcccaaccggtgggcgaggggagcgtacaaataagaggcctcggtagccagccggatacgatcatcctcttgcatctgttttcccatacgcatgaggcagaggcggtcggcgatcataagcaagatcacacgtacgtcctcggcaaacgagaaaagcaaatgatggaaattctccgagttgacggcggtgttccgggcatacaggtcggaggtcttcaagaggcgacggatgatcaaggtcacgtccgctccgaatttctgctccacttcctctatcgtgatcgctttcttcaataccgggcggtataataggagggcgatgaccgaggtgcgtttcaagccaatctccaaggtggcgatcaaggccgtgtcaatatttcgcaataaaccgttgataccattcttatccctgctgtagcaatcgagggcgacaacccgcttcatcagctccttcatctttcggatatcttccctctcgaggaaagagtaaaggtttcgtaacaggagcctgtatttggagaagaacagcttcttttcctcagacgtaaagaatccaattgtatccatagttatatcatttttattgcccggttgaggacaaaccgcaaaacatgctgtaaaaatacttttttctatggaatttcaacatgtatcttgcggttattttatacatttgcgatacacatagcgcataagtgccctgtggtgttactgatgagattattcacattaaatactatactatgttaaacgcaaacgatttagaacagctgaaagccaaaggaatcagcgaaaaacagattgaagagcaactcgcttgcttcgtaaaaggtttccctttccttgagatagcggcctccgcttcggcagaaaaaggtattatggtaatatctaaagaggaacaggcttcttatatggatgcttgggacgcttatctggctaaaaacaagaaaatcgtaaaattcgtacctgcctccggcgctgctagccgtatgtttaagaatctgtacgagttcctttctgcggattataaggaaccgatgaacgctttcgagaagaaattctttagcgagatcgagaaattcgctttctataaggctttggacaagaagtgcgtggagaatacagggaaagatattcctgcgttggtagccttgggcgagtacaaggaggtggtatccaatttattggagccgaaaggcttgaattacgggcagctaccgaaaggcttgttgcttttccataaatatgccgatacggttcgtacggcgatggaagaacatttggccgaaggtgccatgtacgccaagaataacgccggagaggtgaatatccatttcacggtatctccggagcatcaggctttattcgagcaattggttgccgataaatctggcgagtatgaggagaagttctctgtgaaatacgatgtctctttcagtatccagaaaccgagtactgatacggtagcggccgctatggataacacgccgttccgcgataagaatgataagttattgttccgtccgggtgggcatggagccttgatcgagaatttgaacgatgtggatgccgacgtggtatttatcaagaatatagataacgtggttccggacagcttcaaatgctctacggttatctataagaaggtgatcgccggtgtcttggtaacattgcaggagaaagccttcagatatctggaacagatcgagaccggcaaatatacccatgccgaggtagaggagatgattcatttcttgcaagacgacctatgtatcaagaacccggatacgaaattactggaagacgccgagttaatcctgtatatcaagagcaaactgcttcgcccgttgcgtgtatgcggtatggtgaagaatgtgggcgagccgggtggcggtccgttcctggcggtgaatccggacggtacggtttccttgcaggtgcttgaaagctcccagatcgatatgagcgatccggctaagaaggcgatgtttgagaagggtactcactttaatcccgtggatttggtttgcgccgttaagaatcacaagggagagaaatacaacttgccggattacgtggataagaatacgggcttcatctcttataagagcaaggatggccgcgaattgaaagcgctggaattgccgggcttgtggaacggtgccatgagcgactggaacacggtattcgtagaagttcctatcgagacattcaaccccgtgaagacggtgaacgacctgttacgccccgaacatcaataaatacccagttgtagagacggggcgtgccccgtccctacaactagatccttatattttcggtaattcccacggtgccctgtattccttgcacaatagtttatccgcctccgtatcatggaaactctttccatcccacgataatttcttacccgtgcgataggctatattccctaattgggagaacttggcgatatgcgccccgatctctacgctggcattgcaattccggttccggctcttgatacattccaaatgattcttcgcatgcaaattcaagccaccctctccgtatgacttcttcaagggaacagcctccatgcgggcctgtccgtttaccttttccggaataacctcccagccgccacgatcgatcaccaaggtaccgttctcgccaacgaatcctaggccatgattccgtccgtaggccccgtcgtcaatgccgatcgcatgatcccacataacggtgaagtccttgaatgtataaatggtttgcaataagtccggggtctcgcaagcgtcatccggataaccaaatttacctccggaagccatgatagactccggtgcggtgacgttcatgccatacaatgcgtaatccagtaaatgtacgccccagtccgtcatcaaacctcccgcataatcccagaaccaacggaatgtgaaatgaaaacggttccgattgaacggacgtttcggggccggccccagccacatatcatagtccactccggcgggcaccgcctcgtccggcttgacggggatagaggggcaccaaccttgataagagaatacacgtacggtgcgtatcttacccagctgtccgctatgtacgaattgcatggcgtcctgccaatgcggatcgctacgttgccattggcctacctgcacgacccggttgtatttctgcgccgcccgtaccatgatgttacattcctcgatactatttcccagcggtttctcacaatacacatccttcccggcttggcaagcggataccatttgcaggcagtgccaatgatcgggagtacctacgattacgagatcgatatccttattgtctatcaatttacgccagtctttatataaatgctttactttcttcccggtgatcttctcggtctctgccgcccgattattcaatacgttctcgtcaatatccgacaaggcgatacactctacttccggattacgaaggaacgctttcaggtcttcgaatcccatgccgttacatccgataagcccgacgcctatcttatcgtttgcgcccacaccagcgctcccggctttaatgaaaaaaggactgatggtaagtccggcaccgagcaaagcggtctgccggagaaaatctcttcgagttgtcatggtattactattgatttaaagtatttgcaatattaagcgaaatcctttacaatcgcaaatgataatagctttttaactacttacttagtcgatgaagtatatatcctatggcacttgaagtatatatcctgtggtacttgaagtatatctgtccggtaaggttggtattgtaaggatatgtaccattgcgtctttgtaaaaaaagttattaaaagatatagggatgcgatattggagaatatagtttaactttgtgcattatgttcaccctaaaagggcgatgtgttgtatataatataatgtatagagtatgactttgcgaaatttgcttttctgtttttttatggtgatgatctctgtttcatgtatccgggaggaggcgcccaatgcggaagcggatatcttgtcgtgtacggtggatggcgatatattgaaagccgagccggagatcgacaacgaatccgtgacactgaccgtgaaaagtgacgccgatattacaaacctagccccggtattcaccttgactcccggcgctactatcactccggctagtggttccgcttttgattttacgacgccgagaacctatacggtaacttccgaggatggtcactggacaaagacttatacggtgcgttgtatcgtctccggcgtaagcacggaatatcatttcgagcatataacgatggagccgaagaatggacgttaccagatattctatgactttacatcgaatggagattccgtgacttgggcgagcgggaatgccggatttgccttgaccaataataaattggagcctttagacttcccaaccatgcaagacgataacggatatgtcggtaaatgcgctaagttggtgacccgcagcacgggtagtttcggtagcggattcggtatgcctatcgccgccggaaaccttttcatcggtacgtttgatttgctgaacgctattccggacgcaaggaaaggcacgagattgggacgttttttcgatcatgtgccgacttacttgagtggttattataaatataaagcgggagagtcgtataaagtgaatggcgaggaggtaaaaggtaagaaagaccaatgtgatatctacgccatcttctatgagacggatgagaatgtgaaatatttggatggtttcaacgggttgacaagcccgaacctgatatccgttgcccggatcagcgatcagaaagagacggatgagtggacgcgtttctatatcccgttcgtggctaagcccggtaaggtgatcgataaggataagctggcgaaaggtggttatcagttatccatagtcttctcttcgagtttgaaaggtgatgtcttcgagggagcggaaggtagcacgctttggatcgatgaggttgagataatccagtccggtgagaactaaaaaaacagaggatatgaaaagatatatagtattaataggtatactgtgcttgtcgggtgtcattacgttgaaggcgcagcaggaaagaaaccaaggaataatctggtcttccctaaggggattggaatatacggtaaaggccggtatcaatatcggcggaaccgctccggtgccattgcctcgtgagattcgtgcgatagatagttatcgccctacgctttgtgtctccatagagggcgatatcaagaaatggttcggcgagagcaaggaatggggtatgatgatcggtctccgtctggagaataaaggtatggagacaaaagcgacggttaagaattacagcatggagatcattggctccggtggcgagaagctgaaaggaaactggaccggcggcgtgcagacgaaagtggagaactcttatttctcgataccggtcgtggctctttaccaattgaataaccgggtgagtttctcggcgggaccatttgtctcgttcgctacaaaccggaacttctccggctacgtatacgacggatatctgcgtgagatcaatcctaccggtacgaaggtggagttttctggtgacaaccgtgcttcctatgatttctcggataacttaagaaagtttcagtggggagcgcagatcggtacagaatggaaagcgtttaagcaccttatcgtatacgctgacttgacatggggattgaacgatatcttccaaaaggatttcgatacgattaccttcgggatgtatccgatctatctgaacgtaggcttcggatatgcgttttaggaattgatatgaatcaaaataaggctatcccggacaaggatagccttttttattaaaagattattatggaaataaattattttttataactttggggcaatcattctcagaccaagttacattttatcttatattattaacaaaattaccatgaaagaaaacactaagaagggcgtaagccgtagagagtttttgggtctttccgcactaggattggctagtttaacaattcttcccagttgggccattgatggagtccgtatcgccccgagcgatcgagtcgttttaggttttatcggcctaggtcagcaagcattatcagactttaaaggatttgccgcatgtccgggcgtacaggttgccgcatgttgtgacgtggacacgatgaaaacagagcgtttcagaagacgtgtcgctgaatggcaagcctcaaagggaatgaaccaacgttgtgatcaatatgagttttacgaggatttgctggagcgtaaggatatcgacgctatcgaggtcgctaccccggaccactggcatgccttggctaccattcattcttgtcaatctggaaaagacgtatattgtcagaaaccgttggcttatacgatcgctgaaggtttggctatggtaaaagccgtacgtaataataaacgtgtgcttcaagtaggtagccagcaacgttccagcagagagttccaagctgcgatcgatatggttcagaatggagccattggtcatatagagaaaatatatgcacgtgtaggtgagcctcctacgccgctgagcttgccggaaatgccggttcccgctaatttgaacttcaatcagtggatggggccgttgaacgatccgaagatccattatcatcccgatttatgtcctcctatttctctggatccggaagagaacgagaaactatggggcgcatggcgttggtatcaagagaccggtaatggttataccgctgactggggcgctcatatgttcgatatcgcccaagccgctatcggtatggatggctctggtccggtagagtttacacctaagggatacaatggcacgcaatattcaaccatgcgctatgcgaatggtatcgtaatgactgaacaaccttatttggaggataatccggatgcgcagggtattaagtttgttggtgataacggttggatcgaggtagctcgtggctacatcaactgctctgatcagtctaagatccccgccgacttgaagaatttgatcgagaagcgcccgagaatgatgactccggaagagcgtaagaagatgtatgaggaatatatgaagaagctgaaagacagcaaaaagaagggtaacgatgcgggtaattatgagactagtgctccgcatatgcagaacttcatcgactgcgttcgttcacgtgagaacccgatcgctccggttgaggtaggttgcagtacgaatacgctttgttgcttacagaatatcgctcgtgagctaggccgtccggttaaatggaatccggctacattaagcttcggtaatgataaggaggcggcttcccaccgtttgtactggtatcaatatcgcaacccgtattcattgccttatttctgtaaataagcctatttaaatagaatgatgttatgagtaacagacgggatttcttaaaaaatatctctctctttaccgctggtggattgctggctggtaaagccggttccgtaaatgcggcgaacgctgcgttgggagttgtggatgaggtccatgccggcaaagagattggcttgcagatctattctttatcccaagaattatataaaggcgacgtggccgctaatcttcggaaggtgaaggatatgggatactccaagctggagttggcgggttatggtaaaggcgctatcggaggtgttcctatgatggacttcaagaaaatggcggaagacgctggcttgaagatcattagctcgcacgtgaatccggtagacacatctatctctgacccttttaaggctatgattttcaaatactcgaaggaggttaccccaaagatcatggagtattggaaagctacggctgccgatcatgcgaaactaggctgtaaatatttgatccagccgatgatgccgacgattactacgcacgatgaggctaaacttgtttgcgatatcttcaatcaggcctcggatgttatcaaggcagagggcatcgccactggttttggctatcataatcataatatggagttcaatcgtgtcgcaacgaaagagcaacaggagaaagtgaagggaaatcctttcgctgccttcatgaaagtcggagaccagatttatgacttgatgctgaaagatacggacccgagcaaggtttacttcgagatggatgtttattggactgtcatgggacaaaacgatcctgtcgagtatatgcagaaacatccggatcgtatcaaggtattacatatcaaggatcgtgccgtattcggccaaagtggtatgatgaactttgagatgatattcaagcaaatgtacgcgaacggaatcaaagactattttgtagagttggagcaaatgccggacggacgtactcaatttgcgggtgtgaaggattgtgccgactatttgatcaaggctccttttgtaaaatgaagtaacaatcgatagatcgtaagcctcggggttaataaactccggggcttttttattagatgaaaggcaacataaacgggtctattttgtttttataaaaagaagtttatatcgcaaaaatcaaggaaaggatgagttctaggatatggaagatattgaaacatacggtgatcgctgttttatcgctggctgtattgttcctagttttgaatcttttcctgacaggtcgtttggagcggtacctgaaaagagaactgatagagcgtacggcgaatgctacggatggtttttatcgcctttctttcgataagctttctattagcttcttcaagggagagctaaggctagagggtgtttcattggagccggactctaaggtctttgaacattgggccgccttggatagcttgcccgatacctatgtaagtacccggattgaggtgatagattttaagggaattaatttggtatggcgatggaattaccggcaactccatttcaatacctttgagatccgctcgccggaggttcgtgtatacggctcttccggatcaaacccgttagtttccggactggcggcagatacggtagagcatgccgaatcgaagaccttgtacgaggtgatctctccatacatagatgccctgagcgtaaagaccttgaacttggaaaatgccagtatctcttataatgtggaaaaccaagtctcgccgattatctatacgttgaataacgtaagtttccatgcgtatggttttatgttggattctacctcttcacggagcgggaagctgttgtattgcgataacttcgattttgtcacgaaccagccgcaaaccttgttggtaaataatgattttaggttggagacggatagtatatgcctcagtacccaagattccattatctatatccaaaaaatccaattgcttccgcaagaattattgtggggggagaccaatcggaaacctacgaattatctggaagggaaagtgcaaaccgtagagatacaagggattcactttagacgggaagaagccttgaactatttgtccgcccgtaattttgagatacaatcttcggatattaaggtgtatgacttaactcgggagaagaagcaggcgaatgccgatgcggattctttggtgcaagccttatcgttatatgatgtgatctctccagtactacatagtatatccgtggatcaaatacgaatagagcgaaccgcacttcactataccttagccttgaaagggcagatagaggacttctcgatccctgagtttaatttccatgcggaaggtcttctgatcgactccttggtagctccgggcgaggaactgaattattttcgttccattgcgtttgaggcgaatgatatacaagggatcatgagggctcgtaatcatcggttcgatatcaagcgtttggcgatgaatacggccttaggctcgtttcatatagatagcatgcgactacgtccgttgtctgttcgttcccacaatgattatttgtcgggaagtatcgatacgatccggatagacgggttggcgtacgacaaaggtgttagcgcagatttactgaaggttcggtcgcctcgcttggtttattataaaacgccctccgttgaatctccggataaagggaaaagcacatctgtaaatagccgtgtggatgtggagagtttgttaaatcctttccttcggtatctttccatccgtaagatccagattcggaatgcaaatgtgacattggaggatcgtgagataaatgacacgacccggtaccgactcaacggccttgatttctttgctacgaatttcttggtggatgagcaaacgaaccggagtgggcaattgtttttcaagtatgatcattttggtcttagtttccgggatttcgataactacttaccgggaaaggatctgcgtgtgactataagaaaaggttcgctatccaccgtaaacggctttttccgtctacaggatgtgaccctggccgctaaaaaggactcgatacgtttttcaaccccattgatttctttagcgggaatccggattcccaagaatagcatctatcagatcgggtttgaccgatttgatttatccgatggtgatttttctatgtcttggggatcggatacgacaatattgcggactgagagccaaaaggatatccaattggctttggagaatgtgtttgtggatttgaagaagaagacgtttcaattaggtgatcttcagctacagacgaaggatatcgatataccgttggataacggcttctaccgtttgaaaatcgggaggctggatttgagaaagtcaggtttgaggttggatcacgtacatttagtctcgccttattctaaaatggaattcgcttataaacagcctaagcatcaagattggtttgacgtgaaggttgggaacgtaagattgaacgacgtggatattcccggatatttctcaaccaaggaattacgtgtggggggactctggataaacgatgtcttactacaaaacttaaagaaccggaagatcccggtggagcctcatatcgttccgatgatttatgaaggtttacaaaaggctccggtccgtttcaagatagataccgcttccgttgccaatttctccgtggtttatgaggaattacccgttaaaggcgataagctcggtaagctcggtaagctttattttaccgatatgaacggccaattttcaggtttgaccaatatcgtttcctatccggagcaattcatcacattgcatgcggacgggaacctgatgggatcggggcatttcacggctacatggcaactccccgtggattcattatatgaccgctttctattggatgcccgtttggatagcctagacttgctttccttaaatgagatcataaaacctctggctccggcggaagtgacgagcggttgggcgcaggatgtggtctttcatatggatgcctcaagccggaaaggacggatacggttagacttcccgtaccggaaattgaaagtggctttattgaaagagaaagacggagagaccacacaaaaaggtttcttgtcgagattggcgaacttagttctacgggataataatccggctcatccggagcgaaaagatagtaaattgcgtaaggtcgatatggaaattgtgcgagatccctatcattccacgtttaactatctatggcagatgctaagaccagccttggtggaatccgtgggagtctcgaaaaaagaacaggatgcggccttgaaagtggcaggtttcttcacgaaggtaaagcgctttttcggtctcgataaaaagaaggataagcgggaggagattgatacaaataataaggaaatagaacctttaaaagaataaataatggaatatacagtaaatcactatccggagaaacatcgtttcgaggtagtagaagacggcttgacagcctatgtggaatatcgtttaagaggagatgccttggacattatccataccattgtcccaaaaaacttggaagggcgtgggattgcggcgactcttgttgaaacagcttataaatacgcaaaggaacaggggttgcgccctttggctacctgttcctatgcggttgtgtggttaaaacgccatccggagttttaatccttgatcgtaatacctaacattctagcgatgtccagtgcttgtaaggaggttacggtagcacctttcaactctcctccgggaatcgagccaatacgtataccggcgatctcggaggaagtaagatcgatccctttcaaagaggtccggtgaaactcggcctctactaaattacaatgttcgaattctacgttcgtgaattggcaattgtccaatccgcctcctcgtaaaaagcattgattaaaagatacgttccggagtttgctcatggagaagattacataatctcctttgcaatcccggatggtagtatgattaaagattgattcggagaaattcgttccggtaagtttacacccaatgaactctacccggtaaaagccacatccggataaatttatatttgataggtcacagttcttaaataccacatcgctaaactgagatttacgataattgcaagcaatgaaaccacaattggtgaataagcaggaattaacggataggttctgtttagatacgtcctcgacgcataatccattgaaagaacattctgtaaaatcatcctcttgtctggatatacaatccatccagtccacatcctcccgtaagttttttaccaatctaggcgctgttattttcaacatgttattgtttcctattttaatttagatggtaaagataacggatttgggctaaataaacgatatctttacccttaattccgcaacactattacaaatataactttttaagtacctgagcaacaaaaagttgctcaggaatttgccatgtcagatttttcacctatcttagtgttgcaaatcaaaatatgtatcaaacccgacagacatggcaaaggtagcaattaaatccgagaaactcactccttttggaggaatattttcaataatggagcaatttgactccagactctcatctgtaatcgactcaaccctcggtatgagatgcaggctgtatggttatcaatacagcgaaatcatccgttcgcttatgagcgtttatttttgtggcggctcatgcatcgaggatgtcaccactcatctgatgtaccacctttcgcttcatccgacacttcgcacatgcagtgccgacacgattcttagagccataaaggaactgacccaggataacatttcctacacatccgacactggcaagacctacgacttcaacacggcagacaagctgaatacactgctcctcaattgcctattgtccacagggcagctgaaagagggcgaggggtatgacgttgacttcgaccaccagttcatagaggctgagaagtttgatgcgaagcctacatacaagaagttccttggttatcgccctggcgtggcggttattggcaacttgattgtcggcattgagaacagcgacggcaacacaaatgtccgtttccaccagaaggacacgctgaagaggttctttgaaaggtttgaacaaaacaagcttattatcaaccgtttcagagctgattgcggctcgtgttctgaagagatagtggaagagattgctaaacactgcaagaccttctatatccgtgctaaccgatgcagttcgctctacaatgacatctttgccctcagaggttggaagaaagtggaattgggcggcattgagtttgagctggcctccattctcatcgagaaatggaaagggaaggcataccgtcttgtgattcaaagacagaagcggatagacggcgaactcgacctgtgggaaggagaatacacctaccgctgcatccttacaaatgactacgagtcttccgagaaagagattgtcgaattctataacctccgtggagggaaggaacgcatcttcgatgatatgaataacggattcggctggaacaggcttccaaaatcctttatgggagaaaacacggtgtttcttctgcttatggcactcatacgcaacttctataaattcatcatggcgaggcttgacgtgaagaggttcggactcaaagcaacaagccgcatcaagacgtttgtctttaagttcatctctgtgccagccaaatgggtcaggacatcaaggaagtatgtgctgaatatctattcatgcaacaatgcttatgccaatgtgttccagaatgactttggataacaccgacaacttatagtcgtgattttgcgtattgcctcaagtcgcatggtggggtaaggggcatttatatgtctttatggtgacattcgatgcactgtgccccctttttactaacgatgcagattcttttcgcttctgtatcatattaggcgcgtagttgcggatttgaggtttactttatagttcattttagcaatatcggaaaagtgtgttcgggataattcttctatttttgccttgaaatcctaagaatcatgcgaataaagacaacgacaaagacagagtatcaacaacgtatgaatgtattggttgaatacataaataatcacttaggcgaggatatcgatctaaataagctggcggagatatccggattctctcgttggcattttcatcggatctttgcggagttcttaggggaaccggttggtacgtttatcgttaggatgcgggtcgagacggccgctcggcttttgcgttacacggaaatacctgtcaaggagatcgcctataaggtaggatatgacgtaccctcttctttgtctaaggtttttcgccagttttatgggatttctccaaatgaatatagaaacaataaagattatgtaattatggaaccgaatagaataatgcccgatatggaattgaaggtcgaggtaaaagatttacccggcaaacaagtagcctacattcgtctaaacggagggtataaagaaatcgattatctgggaacttggatgcgcttgctccaattcgccaaggagcaaaacatccaaccattgagtttttcaccgatctgcttgtaccatgatgatccgaaagtaacctcaccggataagctgcgtaccgatatttgtatggaagtcgctccttcggtttgccctaaaggggagattggtacgaaaaaggtattggaaggccgttttatgatcgctctttataagggaacctatcagcaattaggagctgtgtatgatacgctttacggtaaatatctccccgagatgggtctttccttacgggaagtgcctagcggcgagatctacttgaatgatccttgcaatacgaagccggaggatttattgacccagatttatgtggcgatagaataataagagctagagaggtttctgaagtgaataaatgaattaatcttgattgccgtcttctctaattagcggcaatcaagatttttaatattttagacgcgattgtatgatgtgataacttatatacttgcttttacaaattcattatcgatccaataagtcgcttcttcggaagtgaatttcaatatacaatagctcggatctattactcctccagggaaatgagcgaacatccagtcagaccaaagggctttcttgatttccatatcggaaacgatctcgaccttacctgttaacacgatactgtctcctcctttcataaagcaaactccggctttcgggttgagttggaattgtattgtcttatcagagaacgtgcctgtagagaaccatatttgggaaataccatccgcttttatttttcccataggaaccggacggggataaccctcttgcgtaacagacgcgagcatagcggtgtcacattccgttaatatggaaattgctttttcctcgattagcttgaggtctatcatctggacgggtatacataaatcgatcatacatttatcttgtggatgttgatcgagggggatgctttgatagatctcgaatgatttgcctgcgcaaggtttgcattggtgtttggatgtaagcgtgtacatcaagctccatgcggcgggtatttcatccgttcctatctcaaaatgcccgattgcgtaaagtcctccggataataatccttttgagatctcattttctccctctacctcttgaggcactgttaaaccgatatccacacttaactcctttccttcgtgttggtaaactgatataagtttatttgccggaccgtttataagtccttttgccccggcccattgcataagctttctgatagagcttgggatcaagctcatatctccttgatgatgaagatacacgatgtgtgtagcatgtagttcttttagttcaaaagtgtaattcataagattcttatttgtaaaagttcaatagtgcaaacatacggaatgactattctttctggttgtaaaaaaacgactttttatatgatagattcttgcgattttatttttaatcaaatataagtaagcggttcatccgtaggatttggtaaagtcaggaagtaagagggaacgtctcccgctaaacgcttgaattctttgataaagtgggaatggtcatagtagccgcaatctaaggcgatgctgcttaagtccgtgtgtggggcgttcctcagtacttctatggcatattggaattttatgatccggctgaattctttgggagtatatccggtggtatccttgaacttacgttggaaatgccgctggcaaatgcaaatcttgtcgatcaagttttgtacgggtagctgtccgcgagactgttttataaatgaggtggcgtatataatttgtctgtctacttgaatggattgggtgagaaggcgtataagatagccttcgataatgcggatacggacggaatcgtccggctgttcgcaaagcatctcggcaaaggaattatcgaataaaaggttaatatctgaagactggatgcgaagatcggcaaactgtcccaaaggctcattcgtgaaagctgccagcccacagggttggaaacgaactcctagcatatgtagggaatctgtcgtagcggtaagattggaataagacctcatgggaccgacaaaaaaggaacgataaggctgcatgatcatttgatgctcatccacaggaattgtcatattcccgatggaaaagatgaaatccgtgcagccgtccgctaaaatcttaaagcgtgttcctatttcagcataacctttaaacacccaaaacttatcgatgaagggtgctaaaagggcgcatggggtaaattctcgatacatacgattttattcaaatagtagatcctatgatttgttttatttcttttccaaaagatacatataatcgccataaccttcttctttcatttttgctttgggaataaatctcagggatgcgctgttgatgcagtatcgtaatccgcccttatctgtcggaccatcattaaatacgtgtcccaggtgtgcgtctcctgttttactgcgcacctctatccgtttcatgccatgagaattatcggtattttccataacaaggtctttatctatcggttttgagaagctaggccacccacaaccggagtcgaacttatctgtcgatatgaacaaaggctctcctgtggtgatatctacgtaaataccttcacgcttttcgttccaatattcatttttaaatgctctttccgtggcattttcttgtgttaccgcatattgctcggccgtcagtttggagcgtagtgtcgtatcatcctgtttctggaatttcttttcagaaaggggcttgccggtcgttttctccttatttgctttacgtgcgaaatcgaatagttccggacttatatggcaataaccgtccggatgtttgcctaagtaatcttgatgatattcttctgccggatagaaattaactaatggctccacctcgacaacgatgggcttggagtactttttagccaatgtctctatagcctctttgatgataggcagatcggcggcgttggtgtaataaatgccggtacggtattgtgatcctctgtcattaccttgccgattgagacttgtagggtctatggtcttgaagtatagttctaacaatagttttaaatcggcttgttgaggatcgtagcttacttctactgtctcggcaaatccggtattgtcgttacatacctgttcgtaggttggatttttgatgcttgttttaccgttggcataacccacttgggtactagtaacaccattgatttgtttcatgaaatgttctgttccccagaaacatcctccggcaaaatagattttactttgtgcattcattttagttgttttagatagttgatcactcatttttgtttgtgcgattactaaaccgcttgccaatagcaaaacgatagtcaaaattacatgtttcatcttatatatatattattatataaccaaaatattaagaaaatggtttcaactaaaagtcgtatgccttcatgcggaggattatatgcttggctattatttgatttttgtcccaccgaatacctcgctcatatccatatggtcaagagccgtgtctatctgattgatctcggcgggatttatctttatatccacagcccccgcattctcttttagccggcagagatgacgagttccgggaataggaacgatccacggctttttttgtagcatccaagccagggatatttgtgcgggagtagcatgatgctcatcggccagatggtttatgagatctagaagaggcttgttcctctcgaaactttcttttttgaattgcggcatagttgcccggtaatcattttgaggattgaatacgcttttgacatcatagcaagcagaaagtaaaccgtttgccaatggcgagaaagcaacgaagccaatgcctaattcctctagagaggggaaaaggttttcatgccaacgtgccatcatggaataacgattttgtatggcggttataggacagaccttatgcgcacggcgaatatagtcctcgcccgcctctgatataccccaatgcaatactttgccttccttgatcaagtaggccatcgtgtcagctacctcttccggttctacttggggatctatgcgatgctgatagtaaaggtcaagatggtctgtcttaagtctggctaaagagccttccacggctaaacgaatcgacttcggtttagaattcgggataaggggataagggccacattcgctagacttatcaaaagtgagtccaaacttagtagcgatcacgattttatcacgaaatggctttaaggcatcgcctaaaagctcctcattgtcatgaggattcgtgtttgtaccatatacttcggccgtatcgaagaaggtatatcccatatcaacggcgagggcaaataattccgtcatctcttttctgtcggcaggtgcgccataagcatggctcatacccatgcaacccaatcctatagctgagaccctaagtccgcttaatcccaaaactctgtattccatatttatttatattttatctgagcgcaaagttgggaagaagtatctccaccggtgtaacaacaattgcggatataaatacaattatttcggttttctgtaaaaatggtgatacaatccgtaatctgtattcattctgtatgattgggtaaatgtatcttagcggtcaaaaaataacagaatatgaagagtaaaattattgtagttttattaattatgaacatggtaataagtgcttccgcacaaaatcagaatcagtatggattggtatatcgcgatgcgataagtgaaaatgtggttggaaaagtaactatacatcctgtctcgtatgaggttggaggtataggggtagtggcgaatgtctatactcctgcgaattatgattcctcaaaagagtatgtagctattgttgttgctcatcctaatgggggcgtgaaagaacaagttgcgggtctctatgcgcaacggctggcagagcttggatatataactatcgctgccgatgcgcgttatcaaggagcaagtggtggtgagcctcggaatacagatcgtccggccaaccggatagaagatattcatggtatggtggatttcatatctcaatatccgggtgtagatgccagtcgtataggtgcgcttggtatttgtggcggtggaggttacgcgcttggggctgcacagggtgataaacggataaaggcggtcgctacactcagcatgtttaattcggggcgtgtacgtcgtaatggttttcaggattcccagataaataccatacaacaacgtttaacccaagcggctgaggctagaaatgaagaggccaaaggcaaagttctatacacgggtgagatgaatgtctccgatgaggaggcggcgaaactaccgtttgccctatatcgtgatggttatgagtattactttaaaacccatgctcatccgaattcgacatttcgctataccatgagcagtttattggatcttatgacttgggatgctacggatcatatcgacttgatcgaccagcctttgctattgatcgccggaagtgatgccgatacaaaatatatgtctgacgaagcttttgaaaaggctaccggaacaaaagataaagagatgtatcttattccaggagcggagcatatcaaaacttattttgtcccggaatatgtgaatctagcggtaaataaaatgaaagatttcttcgggatgaaattgtaatttgattaaatttgtacgatctaaaatgggggtatcatgaaatatgacaaagatagtgttattatctctgatagtctgaatgggcttgggacagatatttataaagagtatctgtctcatgccttgtgtttgggtggagcatgtaaattcgagttcaatggaaatccattcgagttacatgaaggagattgtatgattgtgcgtaaaggaaaactggttgagaagatcaccccatctgcggattttaaggttaaagtcatttatgtcactccccaattcattgagctttgtactccccagaataattatggaatgaaaggccagttatctttgttcctgaatcctgtgatgcgtctggatcgcgagcaacaggatatctgtaagaaagatttcgagaatatagagtataggtttaacaatgaaaaccataatttttatcgtgacataatgattaatgtgatccagacaatgattctggatttcttcgattttcactcacatatttatggggaggagaagatctcggcccaatatgcctccattatgagtaagttcctgcaaatgctggaagatggggtttatcgccagcatagagacgttacatactatgcctcggaattatgcgtgacgccgaagtatttatcggaagtgacgaaaaaggtgagtggctatgcggcaaattattggattaaccgttatacgatattggatatatcacggcttttgcgtgataagtcattatctttcgtttatatttccgatttgtttggtttctcttctccctcttatttcagccgttatgtgcagcataatttaggtataaagtcctcagattatagggagtgaccttgtaagctagcttcactcctttccttttcggtaaaatttgtagttgacaccgacttttttgtattgtctcaaaactcctttggtcgtaacttcgcaacgaagaataggtataaatagatgatggaaaactatttatatataatgtataatcaaattaataaagccatgcaaaaaattatgagatcattatttatcgcgacattgttgttggtatcgatgggaatgggtgcctatgcgcaggaaacaaaaaagacatttactccggagcagcaggagatgatagatttgtctaatgcgaaatggaaatggatgtcagaaaaagatgtggataagctcgacgccctcttccacgagaactctatgtttgtacatatgggtggttcgtggggtaagcagccggagcttgatgtgatccgtacgggaaacatacattacaagcatgcggagatacatgatgtagatgttaaattcgccggttgcgccggaatcgtatatagccgtattcatcttaattcggtagttggtggtagggaggtcaggttccctttcatcgtgactgagacgtacgtgaaggaagacggacaatggaaacttgctaccttagcatttactcgtacggtaggagaataatgataaatacatatgaatatgagacagaactttctaatccggcttttctgcctatgtttgttcccggttttcaccatggcgcaaaatatggataatttcagacaaccgtaccccttgggtactaagttgccggaagcgtccgcgaagaacttcattggtcaggcgtatatcgctccaattacggttaatagggagctgaatgtcccaatgtctaatgtcacttttgagcctcgttgccggaataactggcattatcataaaggggggcagatacttgtcgcgtcagcaggcataggctactatcaggaaaaggggaaaccggccagaagattgtatccgggggatatcgtggaaattgcgcctgacgtgattcactggcatggggcggctccggatagctggtttgctcacgttgccgtaagttgcaatcctcaaacgaatgaggcggtgtggctcagtccggtgggagagaaggaatatcaagaagcgacaagccaagcggagaatgtgtatgccgaagcaaaccgggtattggaagccagggaacaagccattgtctctatcgcggcgtacacgggcaagggagacttggcgcatctgagacaggcgcttgtgaaaggacttgaatccggtatgaccgttaatgaagtaaacgaagtactaatacatgcctatgcttattgtggatttcctcgcagcttaagagccatacagacatttatgcaagtcattgaagagagaaaaagcatgggaattaaagatgtagagggtcgtgaagcctctgctatcgaggatggtgggagtcgatatgagcggggacgggatattctggcggaaatatcgggtacgtctgcttctgtccctaaaaccggatatgcggtatttgccccgacgatcgaacgtttcctcaaggaacatctgttcgcggacctttttgagcgcgacttattgacatatagggagcgtgaattggcgaccgtgtctgtattggcaggcgttggcggtgttgaacctatggcttacggccatatgtcaatttgcttgcatctgggtattacgccagagcaacttacggctttgctaaatatcgtagagataaacctagggaaaaagagttcagatccattacgtgatgtgctcggacaattaacggataaaaaatgaatcagaagaatatgaagaagattttattattagctttattaatacccgtgtttggaatggcagatgctcaggatttagtgatcgctaaacaagggcatttctcagtaggaggacaaaccatacagcgtccgggtacgtatgacaacagtaagtttgtcggttgggctacccaagtcgagaccgggcagagctatcgtgcggatcatgctttcgtggatttccaagttccggcccatgcgaaaaaattgcctttggtttatgttcatggttatggtggctctggagtatgttggcaaatgacacccgatgggcgggatggtttcgctactctcatgttacgccggggatatagctgttacgtgatggatcttcccggtcgtggccgtgccggaaggacatctgctacgactacggtcaagccgctggccgatgagatgttctggtttgacatctggcgtatcgggatttggccggaatataacaaaggtgtgcagttcccgtctgattcagcctatctatcgcagtttttccgggagatgacgcccgatatcagtgatcacaaacaagatgtaccggcaatcaatgccttgacggaaaaaataggggacaatatccttgtaacacattcggcgggaggtttcccgggatggatggccgctatacaaaatccgaatgtcaaggctgtcgtttcatatgagccgggtggctatgtgtttcccgagggggaggtgcctgatccgatcgccggacttaccggtggggcggctggattcgctattcctatggaacagttcttgcgacttacccggattccaatcgtaatgtatttcggtgattatattccggagactccatcagagaatcttggtggcgagaattggcgtgtacgtctgcaaatgggacgtaaattcgtggaggccataaataggcatgggggaaacgcgaccttagttgagttgcccaagatcggtatttatggtaatacccatttcttgatgcaggatttgaataatggccaactagcggatctgctgggcgaatggttggaaaagaatgatcttggcaaatagcattgggaatggttcttttaagaacttgctgattttacattttgttatcggattagataatcggtaatatatcctcccaaatatgtttcttcaagtcaacgcagccattcttcttgaaggtaatgccttctttctccaataatccccgttgttccgcccagttgggagctaatctgccttggctgtttaccacccggtggcaaggcaggttcagttctttcgggacgttgaacattgcctgccctaccatacgggaacattgtggccttcgggcgagcttggctagctgcccgtaggtaaccacacatccttccggtatctctctgacgatgttataaacttccgtataaaaatcagccttcattgattctggtttttattttcgcccatgcgtgtgtatcgtatagggaggagttacgcattgtctgatacatcgtcttgaaacgtgacatcaggatcgtgagacttaataagttgctttccacatatggtcggaccgagggatcgaagaaaccaaggaacgtgcggtgacctccttgtctattttcgttgacagtgagcgtgatggtagagctgcaaccggaaccaaatggtgtggagacggcatccggattattgttgtcgaaaaaggtccaagtaattaaccctgacaagatatccggagtcgcgaggaacaaaagcccctctaccttttcaaacgagattaatcgatcgatccttgcgaaatggaggtatctgataatctcgccttgcctgatagcgggaagggccttgaataaacagccttgtgtctgctttaattctccaagcagagaatcggaataccagaaagcgatcggcaattccgcctttagagaaaatgcctcgtaataattgttgatgaaagtttgaatatccatatgcgattgatttaggttgatttattcttaccaatcgatttccgggatgcctttaccccgtaagaaatcattagccttactgaaatgcttacaaccgaagaaaccatattcggcggagcggggagatggatgtacggtcgttaggaccaaatgtcggctcgtattgatgagggagatcttggctttggcgtaacttccccataacatgaataccagattttcccgttcgtcgcttaatttcttgataacggcatccgtgaacgtttcccatcccctgttccggtgcgagcctgtttggtgggcacggaccgtgaggacggaattcatcggaaatacgccttggcttacccaacgatccaaattcccggaggaaggaatcggtttcccaagatcatcgtagatttctttgaatatattcatcaaggaaccgggaatcgccacgccatcgggtaccgagaagcagaccccatagtattgccccggatttggataggggtcttgtcccaagataacgacttttaccttctcaaacgggcatgcgttaaatatatggaatatctggggcccgggaggaagtacgtgcgcttgcttatattcgtttttgacaaatgtcaccaattgctcgaaataaggcttgtcaaattcttcttgcagacgttttctccaactttcatctattctaacattcatggtgtttttcttattcttccaccaaaggtacggagaaaagcttaaaattcgaggattttatcgtaactttgcgcataaactttatttgggaattgttgttgcaaacactatggatactaagattattggacaaggatataatctcgatgcagacacgtcggtagggaaggaactgatagaactgttcaacagcaagagatacgatacgttcacttgccttgtggcatttgcaagttatggaggtatttcggcgctaactccctacatcatgcgggagaaagaacgtggtgtgaaaattaaggtgatattaggtgttgaccagaaagggacttccaaagaagctttagaagaagttctatcatggggggtagagtcaaaaatttttcacactcaatccgtaaatatattccatcctaaaatctatttgtttgagaatacagacatctttacactcatcataggttcaaataatctcacaacaatgggattggttaagaacatcgaatgtgcattactgataaaagatgctaagggtgcgcattccgtgcataatgatttttacatttattggaaatcaattcttgatggtacagagagtaacctttataccataacgcaggaattgatcgaccttctctttgctgataagataattgttactgaatcagaaagagccgatagatatgataacggaagagaccaaataacctctgcaagtaaaaaatctatcactttcaatggagcaaaactacaaagaaatccgtctggttattcgcccaaaagacgacaagttaaagctaagcgtataactcaaacagcgaatccaacaaatcctgatcaaccgattatttcagtttctaacgagtctctttctgtcaatggagaagaggtgttaattgcggaaattggtggtggccctcgttggaagcaggtcaactttcctgtagagatctttgaaaacttctttggtgctgagcgtggtaacaattcatacaacattgagcttataaacattgcccaaaacggctcacttggcgatattgaaattcgtcaggctgtttctgtgaagagccataactaccgttttgaaatacgctgtacagaaacagaaggcgcatatcctggtgacagcaaacgtcctatcggtttgtttgtaaaactagacaataataaattcctttatcagattttgttatcaaattatccagcatacaacaatattagaaagttcctttatagagagagtaaggtcaaacgtaaggacgaactaagaagatacattgttcatattgaggcaattcatgctctttatccagaattaatagtttaatatggaatataatttcagaacactgaactaccttggtagtaaactgcgtttgttggatttcatcgaggataagatactcgacgtgacccctgttggtgctggggtttgtgatttgtttgccggttcgggttgtgtatctcgtaggctgtcgcgtaattttgcggtaacagcatgtgatattcaaggttattcaaaagtgattgacaatgcgctgctcaacaagttcgacgttaccgatgaaaatgtaaacaaattctttgaattattgtatacggaatcagcggagaaacttagagatgcttttgcgccactcatacaaatggaacatgaagccattaagaataagagccttgaagtattggcttgtattctcgaatatggatcagttgaagtattcaatctcgaacataatctatcatgcttgtctgatcaacttcgtatggtaaataataaactcataaaaacaggattgagtaatgagttgtcgcttattagccgatactatggtggagtatatttctcatacaagcaagccgttgagattgatatcatactggagactattcacaaatctgttccatcgaaccatcgcgatttgtatcttgctgcattgctcagtacagcgagtgatattgttgatacggtaggcaagcactttgctcaaccaattaaagcaagagatgctaaaggcaaaatcaaaagtactgtttataataaggcggtcaaggataagacaattgatgtgatagcactctacaaggattggttgctaaaatacaagagcttaaccaagaatgacttatgtcattcaactatgcagggagactttgaaaactgtttaaggaatcttcctgataacgtaagaacagtttatgcagatcctccttacactcgtgaccactacagtcgttattatcatgtattggagacattgacacttagggatattcctaagatttcaacagttacaattcatggctctactcatgtaagtaatggtatctatcgagaagacagacatcagtcgccattctgtataaagagcaaagctctcgatgcttttcgaaagatgtttaaattaacttctgctacaaataggaatctcctcttgtcatattccccgtatgacgaaacgaagaaatctcatccacgtgtagtaactatgcaacagattattactttagcgaaagagtattttgataatgtggagacggtgtctgctggtagtttcaaacataacaagctcaattctactgagcattttcttgaagcgtccgatgaagcggaattactgattgtctgtactaacaatagttgatctagacgtacttatgcgatttaaagacaatataaaatttatctataatcctcaagtgtccgttggtggagaggattgtaagaatatccttattaaaggtgataacaaggcgattcttccagaattggcatctgtgtatggggaaaaaataaagtgtatctacattgaccctccttacaacaatggagacacttatcattattataatgacaatatttcaacatctgcttggctaaaagatatgagaactgtttttatttggcttaaacagttgttgaaaaaagatggtagtatttggatttctattgatgataaggaaatggcatacttgaagattgaggctgataagatattcggtcgtgagaacttcgccggtacaataatttggcaacagcgaaagactcgtgagaacagggccgtattttcttgtaatcatgaatatgtacttgtttatgcgaaggatatcaaggccttcaagaagtcgagaaacctacttcctgtagaagaaggctttattgatagtaaatacaagaatcccgacaatgatccacgaggaccttggcaatcaattaccgcaagtgttcaagctggtcatgctgtggcgagccagttctatacaattatatcacctgctggaattgagtttaatccacctaaagggcgttgttgggcctataatcaggaacggatgcttaaggagatcgccaacaataatatttggttcggatttgatggtaagaacacacctcgcataaagaagtttcttgcgaatgctaagattggcttgacaccggaaactctttggacaggtgataactatggtacaacggatagtgccaagaaacatcttctttcactttttcccgaaatggaacaagtgttcgatacgcctaaacctgaggaacttataaagcaaattatagagattgctagcaatgagggcgagtatgtattagattgctacatcggttctggtacaacgatagcaactgcacataaattgaaacgtaattatattggtatagagattggcgaccagatgactgaattggttacaagacgtatgcgcaaagtaatagatggtgaatcgggtggaatttcgagtagcgttgattggaagggaggcggtcagttcattttttataacttcgacaagaataagatggatgaacataagtctgttgttgaacagacgaaacctaaaccttctgtacaatatcatcaactcaattttcttgatcttttcaaacaatataaagacagctgtattgttgagaaccacatgattcgagaagatttaggagcatatgctattcctcgtagccgcttcattaacataactaaaaatgtcttgataggcaatgtgaagaaagataactttgaacagtatttggaacaatctgctgagatttattatacaggctctaggtttccatcaactgttgcattgaataagttatactatttcatgccttacatgaaaggcaagggtatccgtgatctttatcttataaaaattgctcgtgttggttgccgaaaggaaggccaattaggagaggacaagaacgactttcgattggtttttgaaatagagtatgtagatcaattgtttgatgactataagccaatagaattgaagatttggcatacatttaccgacactacggtacgtgaactgataacaatgtatgagaaattttttagtagttcttattcttccaccaaaggtacggagaaaagcttaaaattcgaggattttgtgtaagtttgccttccgatttgaatttaaattagaaaacatgataagttaccttcagatagataagctgaccaagagcttcggtgatttggttcttttcgaggatataacgttcggagtcgcgcaaggacagaagatcgggttgatcgccaaaaacgggacgggtaagactaccttattgaatattatcggtggtaaggaggattacgactcgggtgaggtggttttccggaaagacctgcgggtcgggtatttggagcaatcaccttcttatccggaagaactgaccgtgctacaggcttgcttccactcgaagaacgagactgtccagttgatagctgagtacgaggaggcgatggcgaaagaggatcacttgaatctggaggacatccttacccgtatggatagcttcaaggcgtgggattatgagcaaaaggcgaaacaaatcctcgggcagttgaagattcataacttcaatcagaagatcggggaattgtccggagggcagttgaaacgggtagccttggcgaatgtcttgatcacggaccctgaattgattatcttggatgagccgacgaaccatttggatctggaaatgaccgagtggctggaagattatctgagccgggccaatatcagtatcttgatggtgacgcacgaccgttacttcttggatcgtgtttgtagtgagatcatcgagatcgataataaacaaatctattcgtataaaggtaattatagttattatctggagaaacgccaagagcgtgtcgaggcgatgaacgccgacgtggagcgtgcgaagaatcttctccgtacggaactggattggatgcgccgccagccgcaggcacggggcacgaaagcgaagtaccgtatcgatgccttttatgagctggaaaagaaagcgaagcaacaacgggataccggaaaggtgaacttggacgtgaaggcttcttacatcggttcgaagattttcgaggcggtgaatgtaagcaaacgtttcggtgatttgaagattacggaggatttcaactatattttcgcccgttacgagaagatgggtattgtcgggaataacggtacgggcaaatctacctttatcaagatgctgatgggggaggtggctcccgatagcggccatttcgatgtgggcgagaccgttcgctttggctattatagtcaagatggcttgaagttcgatgagcaaatgaaagtgatcgacgtggtgcaggcgatcgccgaatacgtggatttgggtaacggacagaagatgggagtgtcccagtttttgaactatttcctgttcacgccggagaaacagcataattacgtttataaattgagcggtggcgagaagcgtcgcctctatttatgtacggtattgatgcgtagcccgaacttcttggtgcttgatgagccgaccaatgatctggatatcgtgaccttgaacgtattggaggaataccttcgtaacttcaaggggtgtgctatcgtcgtttcccacgaccgttactttatggataaggtggtagatcacctgctggttttccggggtaacgctgatatcaaggatttccccggcaactatacgcagtaccgggattggaaagatgtgcaagaccaactggaaaaagaggcggaggctgctttgcaagcgagacaaaacccggctccggagaaaccgtctcgtcctgtcaatgagcaaaagaaaaaactcactttcaaggaacggaaagagttcgaggccctagaggaggagataccggctttggaggcggagaaggcggagttggagaccgcgatgagcagtggtactttgcctacggacgagcttatggctaaatctcaacggatcacccaagtcatggaagagatcgacgagaaaacgatgcgctggctggagttgagtgagctggcataagtaataatgaggaatgagcgagactaaacctgtactttggaaccggaatttcgtccaatgttgtatctcttacttcttgatgaatttcgccttttatatgttgatgcctaccatgccggtctatctggtagaggaattgggcatcagcacgtccgaggtggggatggtcttgtctagctatacgatcgggttgctgtgcgtgcgcccgttctcgggatatctggtggattgtttctcccgcaaaccgttatatgtattcgccttcacgatattcgcctgtttgtttgccggttattggtttgctatgacagtctatacgatcatggcggttcgtttcatccaaggcgggtttatgggactgacctcagtctctggcaatacgattacgatagacgtgatcccttccaagcgaagaggagagggcatgggcttttacggattgacgatcaatctcgccatgtctttggctcctttggtggcggtcgggctgtacgatcggcatggtttcttctggatcataggggtcgctttggtgatcgcgttggtcgggatcggctccgtcgggctgatccgttatccgaaacgggagaaagtgcctcgtccggccttctcgttggatcgttttatcttggtaaaagcgcttcctgcggccttggcctatttgctggtcgctataccttatgggatgttgctctcgttcgtggtattatatggtaaagagatcgaggtgccgaacccaggctatttctttatatgtatggcgatcggtgtagggacggcccgtttgatttccgggcggttggtggaccatggcaagatccatgtcgtgtccatcgtatccttggtttctttagcgatctcgttttccgtgttcgctaccgtacatacatcatttgtctttttcgcttgcgccttggcgatcggtatcggttttggcgtgagtgtaccggcttttcaatgtcttttcgtgaatgtcgctccgcaccatatgcgcggtacggccacttctacctacttgacctctttcgatttcgggatggggatcgggatgctgtccgccggctttatcgctacccataccaatctggctaccgcctacggagtcggggcggtttgttgccttctttccttattcgtctatatccgcttggtaaaagcctcgtacgagaggaataagctgatttcttgatctaaatgtggaacctaaatcatgaaatatggataaaattaatagtctatttacaattgggaatgtcaatgaggataatgctcaaaaaatatttgcggatattgcaactgaattattcgagcattgctttatcaaacaaggcgaagccgtaaagtacaaattccttgaagttgaattttacttttggagtgaagcccataaagataacaagcttgataatgagggaaaaaaagaagtgccttttgtctacccacgtaataatactcagcctgcgcaatacttggtacatgctagcggtatggatctttgcttcaaatccgataatggctatggtggcatattgattcgttcattgttacgaattgaaggtaaagagctgtcggtagtaactggtccttgggattgctgttatgcactcataaactatatgggaggttcagaaaatgtgttttcgaaattgacttatggagaagaaaaagatactcaggtcgagttggaaacagcaatacggcataatgttcctgtgggaagttctatgaagaatgcaccatattgtttttacaacaaaaaatatatgcacaaaagtggaaagtggggctttgaagatgtagaactgaaacgatataatcccagcacgaggaaatcagttgcaaatacttattcgataaaaccttggaatagataactcttacgatatggtactgtcagagaatcaaaagaataaagtatatttctccaatctgttagccttgaactatccgtcaatatggaaggagatatgtaatgtcctatcaatctatggttattcggcaggcagattgacctataccaaagattattggtgtagagatttcatgccgattcaagttggaagcaatgagttcgtgcagttccaatatgatccggattatttgactgatttaaggaagtataaaacgaatccgaatgatacggtaaagcatatcactgattttactcctaagatctcaaagtcaaagttgcttgttgatggagggaatatagttgtatgtaataatatcaacgaagaaacttggggcgtaatgactgaaaaggttcttatagagaatcctgatttctcaaaggcggaaattacttctatgttggaaaaagatttgggtgcaaaaatagtatggctaccatgggatactagcgatgaatgcggacacacagatggaattgttaattttattaatgggttatcgtccaaaccttctatcatggcatatttttctctttatcctaagaatatcgctaaagaaatgagaaaactcttgaatgatgtatttgatactcatgaattgattttcacgcatgatgaaaagaataactgggcctatgttaatttgcttcgcacaaaagatttcatcatagtacccggattaggaacagattctgacaatgaagccatggggcagatagagaggttatatcccgattataaaggacgaatccatcaaatcattattgcacctattgttgaagaatatggaggagctttcaattgtttgacttggactgtaaatacagaagatattgattcatacatttcgattcccggtttcgtctaaccccatggcgtacttcgtcgattcttccttttctagcgggaaacctcaccctatatttgtatcaaagatcacagagaaataggtttttaaggtttaacaaatgaaaggaataggtagtatgaaacgtttagtaatggctatgtcagccttgttggtaagtgtgacaatgagtttcgcgcaggaatcgagcttacataaagaaccgtttgtagtcaatgtgggccaattggtaagctatctggaattacgtcccagccagattaatgaggtagcgatgatcaacgattattttagggaaaagcaaagcgagggcttgaggggaagtcataaaatgcgggataaacggatgcggcaagccgtatttggcaacttaaagttgatgaaaaaggcgttaagcaccgatcaatatcggaaatacgtggctttgatcaacgtaacgaacaataataaccggatgatgagcgggctttccttccccgatgtttatctagccgataaataagtaaaggatagatgtaaagtatcaagctattgcataaaaagtatcttgtgactgtatctattctataaaccacgtcgtggtctgtatagatcatgtcgtggtttttatagaccacgctgtggtttgtataatccacgacggagattatagaatagatacggtatcgtataagaatacagctaggcttgtataagaatatatctaggcttttgtttgtttataaacggtgtctatgatgaaatagatagtgtttatcgtaatatgtgttacaaaatgattgctatatgccttgatatatatcaataacgtcaattgtttgcaaaaattaaccgtattgaagaacaatgttataaaacatactgttatatttgcagtaacaaaaagagaaagatagaagatgcggaaacgccgcatttattagttaaggtcttagtttaggtttaaattttaggtattatgagacgtttaggtatgatggtagtcgctttaatgatggtagcgacaatgagcttcgctcaaaaggttagtgattcaaagagtatgagtttcgataagctaagcagatatttgcagcttgacgcaaaccagatcgctgaggtgtcagagattaatacttacttcgagaatcaattaggtcaacccctgtctgcggaagcgctttgcaataacgcaagaccggaagaaactcgcaacgcgttgttgtgtaatttgaaactgatgaaacgtgcattgactaaagatcaatatcgtaaatatgtagcgttgattaatgtgactcgcgctaatcaggaagataaggtttctaatccgcttttggacagctatttggctgagaagtaattaagccaatgtgattgggctatgtgtttttaaggtttttgtttaggtttaacaatttaaggtttttaggtattatgaaacgttttggaatggcagtcgcagccttattgatgtgtgcgacaatgagcttcgctcagaaaccgagtttgagtagagaaccgtttgtggtaagtacagagaagttagcgaactatttgcaattgactccgagccagttggacgaggtagctaacatcaacgaatatttcatcgagatgcagaatgcgagcgtaaaagctagcgctaaattgcaggataagaaaatgtatcaagcggtttacggtaacttgaagttgatgaagaaggctttgagcccggatcaatatcgtaagtatgttactttattgaacatcacgaacaataacaaccgtacgctgggtgttaatacgttcccggaagtgtacttagcggataacgcaagtaagtaatttatactatataagagtgtgtcccccactatttcctgtcaaaaggtaaatagtggggatacttttttttaaggctcgcgtataaatcgaagaagattgtgtaagtttgcggcgttttacaaataacgcttaattcgagtcatgacaacacaacaacttttagtcccttctaatgctactttgaagagaaatgtaatggactactccttaatcgtggtaggttcatttttgcaggcacttagttacgtgcttttcctagcgccttacaaaatcgtaccgggaggtgtgtatggtatctctatcgtaatccactatgtgacgaaagatttgttcccgttcttcccggatggtttgccgatgggtgcgacggcgctttgcttcaatatcccgttgatgattttggcgatgaaaaagatcggattgtcttccggcccgaagacgatcgttactttcttgctgatctctatatttaccgactcattatcttatttccttaccgatccattggtggagaacgatgcctttatcgccgccttttacggtggagctattttaggattgggtgtgacttgtattttccgggcgcaaagtacaagtgccggtacggatgtgctggcgcgtgtaatagctaacgactccaacttgaaggtcagcaatatgatcatcgtattggattccgcggtcgtattgttgggcttgatcgtatttaaggattgggcggtacctttgtattcttggtttactattttcgtatatggaaaaatcgtggagatgttccagacggagaatccgaaccgtgccgtcttcattgtctctcgtaagacacaggagttgaagaccttgatagtcgataaaatgggtatgaggggtacttttattcacggtaagggaatgtatcagggaaatgagactgagattatattcacgatcgctgaacgaaaagatatgccccgcttgaaagatgaggtgaaagagatcgatccgaatgcctttgtttctacgatgcacgctagcaaggattcgcctcggccgggtatttaatagaattaagaattattccgtatatttgtgggtaggctaatattaatatcggttttgaatgatggatagaagaggttttttgaagaatgctacgcttgtgagcgctgcttgtttgatggatttcagggaggctttggcgtggggcgctaaggatgctgaagtaggaaaagcatggaaaggatggaaaaaggggcagttccagattcatctgatttataccggggtgtcggaatcgatgttcttgattttccccgacggtacaacgatgctgcttgattgtggtgatcataatgcggttgggcgcggtaaattggctgtgccggtgcttcccaatcccgatcggcatgccggggagtggatctcacgctatgtccggagagtgaaccctcagaaggattatgttgattatatgatgttgacgcactatcattcagatcacggtggcaacaataaattctacgctcgtaaggagacgagggatggtaaggattactacctaagtggattctctcaggctgccgagtaccttacgtttggcaaggcttttgaccgttgctggcccgactacaacgatcctcttcctttgacccaggaggcagccgatgcttttgagcacatgaaggatttttacgactatatgttggctcataagaagatggagattgagaagttctgtcttggcgaaaccaaccagatcgccatgaagaaagacgctacggcatatccgggattctcggtaagaaatatctgtgccaacggccgcattgccgataaggaggggaatatacgtgacctctatgcggagcgcaagaaatccaatccggttaagttcagtgaaaacggaatgagcctgggcatgatctttacctacggcgatttcaaattctatacggcgggagacttctctgatggctgggagttgcctaatggaaagagattcgagatagaggatgcgatagccgacgtggttgagccggtgagtgtggcgaaaatcaatcaccacggacacatgtcaatgactgataagctcgtggctgcgttgcgtccgcgtgttgttgtcaacaacgtgtgggatcagcttcatacactgccttcggtcatggagcgtttttataaccggaatctttatcccggcgagcgcatcgtgtgtcctaccgtgttccctgcagaacgtcgtgccgaggatgccggacagccgtggcttgatatacttaacccctcgtcgtttgatgccggtcatgtgattgtcaatgtcgaggagggaggtaaggactattcggttacttacctcactgccaatgatgagtcgatgactgtaaagagcgtgatgcggttcaagtcataaacggcttgaatttggtgtcaactgtcaactaaaatgcctatctttgcatcataaaaacgaataaatatagaataataatgcccaacatctcacaaagaggagtcgaaatgcccgcttccccgatccggaagctggctccattggccgatgctgccaaacagagaggagttcatgtgtatcacctgaatatcggtcagcccgaccttcccactccgcgagcggcactcgatgcgatccgtaatgtcgatcgtacggtgttggaatatagccctagtcagggatatcgcagttatcgcgagaagttggttggatattataaaaagtatgatattaatcttacggctgacgatattatcatcactaccggtggttcggaggctgttttgtttgccttcttgagttgcttgaatccgggtgatgagattatcgtaccggaacctgcttatgccaattatatggcattcgctatctcggcaggagccgtgatccggacagtgacgactacgatagaggaaggattttctcttccgaaagtggaaaaattcgaggagttgatcaatgagcgtaccaaagcgatcctgatctgtaacccgaacaatcctacgggttatttgtatacgcgtcgtgagatgaatcaaatccgggatatcgtaaagaaatatgatctttatcttttctcggatgaggtataccgggagtttatctataccggttccccgtatatctcggcttgtcatctggaaggtatcgagcagaacgtggtattgatcgattctgtctccaaacgctattcggaatgcggtatccgtatcggtgcgttgattacgaaaaatgccgaggtgcgtagtgccgtcatgaagttctgccaagctcgtttaagcccgcctttgatcggacagatcgctgccgaggcttctttggatgcttccgaggagtatgcccgtgagacttatgacgagtatgtggaacggcgtaaatgcttgatcgatggcttgaaccgtattcccggcgtttattctcccataccgatgggcgctttctatacggtggctaaacttccggtggatgatgccgataagttctgcgcttggtgtctggaagagtttgaatacgagggtcagacggtcatgatggcaccggcgtcgggtttttacacaacaccgggacttggtaagaatgaggttcgtatggcctatgttttgaaaaaggaagacctggcgaaagctttgacggtgttatcaaaggcgttggaagcttatccgggaagaatgttataaatgaatttagagctatttatcgccgaaaagatacatttcagcaaggagggggatcgtgaggttactcctcccgctgttcgtattgccatgatcgggatcgctttgggattggcggtgatgatcctttcggtggcgatcgtgataggctttaagaaagaggtccggaacaaggtgatcggtttcggctcgcatatccagatcacgaatttcgatagtaattcttcctatgagtcgcagccgatagcggttagcgatactttattgaatgcgctcgatgcattccccggtattcgccatgtcgagaaattcgcaacgaagctaggtatcttgaagactgaccaagactttcaaggtattgtcttgaaaggggtggatacggattatgactggactttcttcaaggataatttaaaagagggcgagatctttacgatccagccggataagaactctacggatgttattatttccaagtatttgtcagatctgctaggactaaaggtaggggattctttcctgacttattttgtgcaagacgatgtgcgtgcccgtaagttcacgatcacggggatttatgagacgggtttccttgattatgacaagatgttcgtaatcgccgatattaagcagatacgtcgcttgaacggttgggataaagatcaagtaagcggactggagttgcaagtggatgactatgatcgtttggaccaagtggccgaggatatttatttcgatctgacggaacggcaagaccgaaatggtaatacgttttacgcccgctcgatcaaggagttgaacccgatgatctttaattggctggatgtgctagacattaatgtggtggttatcttggcgctgatgctttccgtcgcagggtttaccatgatctcaggattattgatcataatcttggaacgtaccaatatgatcggaatcctaaaagccttgggacaaaataataacagtattcgcaagattttcttgtatgtctctttcttcttgatcggcaaaggaatgttgtgggggaatatcatcggtatctctctttgtttgcttcaatctcatttccatattatccaattagacccttctatttattatttggatgccgtgcctatcgatctgagtctattttcactgttccttttgaatatagggacattggccgcctccatgttgatgatgctgggaccttcctatttgattacgaagattgatccggccaagagtatccgttttgaataaaagccgtatctttggcatacgttctagttttgccggattgatatgacagatcttatctctaaagaaaagcgtagctatatcatgtctatgattaagggcaagaatacaaagcccgagattatagtccgtaaatacctgttccattgtggctttcgctttcgtgtgaatgtaaagcgccttcccggtacccctgatatcgtattgcgtaaatataagaccgctatcttcgtgaacggctgtttctggcatgggcacgagggttgcccggaatttcgtcctccccgtacccgggtagagtggtggaccgagaaactaaaccggaataaagctcgggatgcccgtgtacgtgaggaattacgagcgatgggctggaatacgatggtgatttgggaatgccagcttaaacccaaagaacggcaagctactttagaaaatgtcgtccgtttattggaaaagacgtatgtggaatctacctatcatgcgaagtttaccccagcctacccgctactagaggaggaagaacttcccaaagtggcggaagaagagatatcctatgagagtgctcatcattattaattctccaaccggaacgtataatccttcctacttctgaaaagccggtaaatacggacatatccattgaatatgggttgaataaactccagcaggaataaccaaccgatagtagggctttgttgaagcattcgagccgatttgccgaaaacgattgccttgattataaaacgtatcaaatataataatacggcgatcaaggagattagccagttgccctgtaatccgatcacaaccgtagcgataaccgatacttggaaaaggaagaaacaagtggattcgagatgatagaatgtcaaggcgcttcctttgtaataccgttgagtggcggcacgggaaaccttcatctctttccagattccaaaacgttcgatttgatccatttccgttaggctgtccggagtgtagattactttcgtattctccttggtcgaggcttcgttgatgaataagtcatcgtctcccgcatgcaagttcaaggattggtagtaacctttatgcttgaagaataactctttccgataagataaatttcgtccgtttccggtatatgggtgatgggagagggcggaagatagataacgtaaacccgtcaataagttatcataggcgatcaacttatgaaagaatcccttgtagttgctgtatttgcagtagcccaagacaatactggtctcgggtgtgtatccaccaaccatggcagataaccattgatcgttgagcggttggcaattcgcctccgtgaatagaagaatatcgtatttggccgctttcacgcctagggtaaacgccagtttacggcggcttaggtaacgagcgtccgaggggacgtaagtatgatacaaatgtttatactcattttgaaagaactttagcgtatcgtcagtatcgtcgctcgagccatcgttgataacgactacctgatattccgggtaatcttgtgtaagtaacgcaggaaggtgtttcttgaggttctcagaatcatttttagcgtatatgatgatggatacggggagtttattaccttcctctaaggtatcatccgttcgtcttgacgcacgtaaaaggcgggcataagcgatcagataataaagagataagataacgaaccctattaaggtgattcccaataggaaaagctctgtattattgagtagaaacataataatgtgccaatgtgattaatatgccaatgtgccaatatcattaatgagccaatatgattaatacgccaatgtgccaataagctactcaaggtatttacattggcacattgatcaattagctcattattttatcgtatcggaataataggctttcggtaaatggcggcagttgtattgggaggccatgacctcgccataagcgccggcggaacgaagggcgatcaagtcgccacgatgagccttattcaactctacatccttaccgaatacatccgatgactcacagatcgggcccactacatcgtaagtctctactgcctcatcgctgctgatgttctcgatacggtgataagcgtcgtacatcgccgggcggatcaattccgtgaaacctgcatcaaggatagcgaatttcttcgtctctccttccttgacatataataccttagagattaatgttccgcattgagcgacgatcgaacgtcccggctcaaaatgtacctgttgacccggacgtacttgaagcagtttatgaatggctgcgaaatagttatcgaaagccgggatcgataaatgattcgggtgatagtaatcgatacctagtccacctccgaagtttaggttctccactgtaaccccatgagcttccagttcttcctgtatctcgttgaaacgaattaccaaattgcggaagctagacatatccgtgatctgtgaaccgatatggctatggataccgatcaacttcacattcttcatctcctttaatttatccagtacacctcctaattggctaaggttgataccgaatttattctctttcatacccgtcgtgatcttggcatgcgtatgggcatccacttccgggttgatacgaagggcgatagaggctactttatttttagcggccgccagctcattgatgatttccagctcaacggcagattccacgttaaagcagaaaatatcattgtccagtcctaggttgatctcccaatccgctttgccaacaccggcaaagacaatcttatcggcaggaaaaccggcatctaaagctgcctgtacctcgccgccacttacgcagtctgcgccaaggccgtttgccgctatgatggaaaggatacggggattggcattcgctttcacggcataatgcacgtggtaaccatatttcccggattcggtttttactacgtctaatgtgtcttgcaatagcttgacatcataataataaaaaggcgtagaaagctgcttgaacttttctacaggaaatgttcctttgagcatattatacgaaattatataaagataaataagggcagtctgtaaaaggccgccctcgtttgtttttatttgttgttaaataaatgatcgcttagagcttgcagcgctctctgcttgtccgaggccttgatcagcaaggagacgttgtagttgcttcctccgtaggagatcatacggaccgggacatccttcatagcttgtacgatacaagcctcgaagccgatgttatcccattctaggtcgccaaccacgcaaacgataaccatatcctcgtctacggtcacggttccgtacttcttcaaatcgtcaacgatctcttccagatgcttgcggttatcgatcgtaacggagacacccacttcggaggttgtaaccatatcgatcggagtctggtagttctcgaaagtctcgaataccttacgcaagaaacctgtagctagcaacatacgtccgctcttgatcttgatagaggtaatattgtctttggcggcgaccgctttgatcttacctttttcgatagcgtttgagatcaatgtacccggagcgtccggctgcatcgtatttaacaaacgaaccgggatgttgttcaatttagccggcaatatacaagtcgggtgaaggatcttggctccgaaataagctaattcggcagcttcctcgaaatgcaattgacggactggagacgttccctgtacgatacgagggtcgttattgtgcataccgtcgatgtctgtccagatctggatctcttccgcaccgatagctgcgccgattaaggatgcgctatagtcgctaccacctcgttgtaggttatcgatctcgccgtaagcgttgcggcagatataaccttgtgtgatgtatagatcagcatccttattatcagcgagtaatttcaccaatttctctttgatatagacagggtccggttccgcgttcttatccgtacgcatataatccaaagccgggatcaatacggatttcacgccgcattcgttcaaataaagattcatcatacccgtagagatcaactctccttgtgccaagacaaccttttcctcgaacaaggtaaacagatccttcgtgaacgtacggatatattcgaaatgagattttatcagttctttggccttctgtttatattcctcggtgctgtatagttcctcaacatggcccatatatttcatggcaagcttgttgatgatctcattcgctccgtctgggttctttttgtacaggtagtcggaaatctcgactaacgagttggttgtacccgacatggctgacaatacaacgatcttacggtctcccgtgatcagtttcgctacatctttcattctctgtgcagatcccacagaagtaccgccaaactttaaaactttcatcttcttttgttctatattaaattgttttctttttcaatcgaatgcgaccgcaaagttacaaaaaaattattctctgacatcacttagacaggcattctcgcattttactatgcgggcaggataattatgcacgatcgtatagttatgagtggtcataatcaccgccgttccctgctggcagatgtcgtgtaagagttgtacgatttgtccgctcgtctccgggtccaagttgccggtcggctcatccgccagtatcaacttggggttgttcagaagggcacgggcaataacgatacgttgttgttccccgccggatagctcatgcggcattttatagcctttgtcttgcatgcctacctgacggagcacgttgtctatccgttccttgatctcgcttttctttttccatccggtggctttcagcacgaattccagattcttggagacggaacggtcggtcaacaattggaaatcttggaagacgatacctagtttcctacgcaaataagggatatccttccgcttcatcttggtgaggttgtaatccatgatacgtgcctcgcctcgcaagatcggtatctcgcaatacaaggacttgagcaggctgcttttaccggagcctaccttcccgatcacatatacgaactctccgttacgaagcgtgaggcatgcgtcgtgtaataccctgttttcctcacggcatatctccacgttctctaatttgagtagaatatcttcttccatagaatttatcaacctttatgtcttttctttaattcacgggcgaggtcttccagacgaagtcccttgcttgtcaataatacgattaagtggtaaaccaagtcggatgcctcatagatgaagccgtcctcggttccgttggtcgcctcgataacggtctctaccgcttcttcgccgactttctgggccatgcgattcacgcctttctggaataaggtagtcgtataggaaccttccggcatttcttgacggcgacgctcgatgaagttctgcaagtatttcaagaacatgatatcctctacgttcttctcgccgaaacaagtatccgctcccgtatggcaaaccggtccggctggaatcgccttgatcaataatgtatcgttgtcgcaatccgccgtgatgctaaccacctgcaacgtatttccgctactctctcccttcatccacaaacggtttttcgtgcggctaaagaatgtaaccttacccgtacttactgtctcatcataagcttcttgattcatgaagcccaacattaataccttactagtgttgttgtcttgtacgatagcgggaattaatccgcccattttctcgaaatctaatttcatctttatatataatgtgttatatccttacattgatcccctcgtccttgaggtattgcttcaagtcgctaatccgtatctcgccgaaatggaaaacgctggccgctaaagccgcgcccgctttcccgttggaaaacgtatcccggaaatgttccatctttcccgctccaccggaggcgataaccgggatatgcaacgtatcggccaaggtagccagagcgtcgttcgcgtatccgtcttttacgccatcgtgcgtcatactggtgaaaagtatctcgccggcgccacggctttccgcttccgaggcccattgaaacaaatacttatccgtcgggacacgccctccgtttagatagcatagccagtcattgttctcaaaattagcgtcgatagcgactacgcatacctgactaccaaagttcttggcgatctcctcgattaataccgggttacgtaaagccgccgagttgatcgagaccttatcggcgccagcgctaagcaaacgatccacgtccttcaattcgttgatacctccacccacggtaaaagggatgctgatatgggccgccacttgttttaccaactcggtgaaagtctttcgcccctcgtgtgaggcggtaatatccaagtacactaattcgtcggccccttcacggctgtactgggcgcccaactccacggggtctccagcgtcgcgaaagttcacgaagttgatgccttttacggtctttccatcctttatatccagacagggaacaattctcttggctagcatatatctattttattatttcaagtaaaacgaagtaaatctttcaactggatcttcccctcataaatggccttgccgaaaatgacagcgggaatcccagcctcagataatttctcaatatcctcgatcgagcttacgccaccgctcgctatgatataaaggaaggggatctcgtcccgtatctctttatataaatcgatagccgggccttgcagcataccatcccgtgcgatatccgtgcagatcaccttggtaatccccttgtcgtaatatcctttgataaaaggaaccaactcttggctggtcgtttcctcccaaccgctgatggcgatcttcttttctttggcatcggcccctaatatgattttctcgctaccgaacttgctgatccaagaggtgaacatttccgggttcttcacggcgatactgcctccggttaccatctgggcgccgctttcgaaggcgatctccagatcatcctcttgtttcaagccccctccgaaatcaatgatcaaggaagtccgggtcgctatccgctcaaggatacggtagttgatgatgcgtccttcacgggctccatccaaatctaccacatgcaaacgccggatgccgttaccctcgaacatcttggccacctccagaggatcttcgttgtaaaccttcttggtcgcgtaatctccttgcgtcaaccggacgcatttgccatctattatatctatagcgggaataagctcaatcatatctttaaaaagtttttcaatataacctctcctaccgatccacttttttccggatggaactgtgtcgcgtagaagttgtccttatgtaaagcggcgctgaacggaaggatgtaatcggtcgtagccgccgtatattcatttacaggtacataataactatgtacgaagtaaacaaatttgttctccaatcgctcattgaataggccgcttttaacgtttgtcaaggtattccaacccatgtgaggaaccttgtcctcatgctttcgcggaatgaaacgttttacttccgtagggaagatccccaagcaatcagcgttcccctcctccgaacgcatgcacatcaattgcatgccgaggcatatcccgagtaccggttgctttaggttcaagatcacctgatccaatttatgctcccttaaatactccatggtcgtgaaagcttcacctactccgggaaagataaccttatccgctttatttaataattccggatcagccgtgatgatcggggtaacgcccaaccgcttcaaagcgtaatctaccgagtagatgtttccggcattatatttaataatggcaacgtccattgttgttaagcatttatattgagtcgcaaaagtaacaaattatcattacataattatgaatggcgactgaaaagttccaaaatgaaatgtatttgtgataaactggtgtgatcgggaaggggataggggcggcataattatgtagcttctgaggtctctccagatatttttgctatcaaatatgatatttttttgcgtcagctattgcaggtttaaaaataatacttacctttgcaccgcaatcgagagagatagcgataaaagaaaagaggttcggtagttcagctggttagaatacatgcctgtcacgcatggggtcgcgggttcgagtcccgtccggaccgcctctttttcaaaattattgttgattataaaatggttcggtagttcagctggttagaatacatgcctgtcacgcatggggtcgcgggttcgagtcccgtccggaccgctttcaaagaaagcaaaataaagtaaagctctgtaatttaaagattacagggctttttcttttttcatcacttatcaagatatggcctttcgtatttgggcttaccatatatttttgtgaattctctctttcactcgaatatctttctgcttacatatatgtgcatcctcggccacataaccgatggcgagaaaacaagtgaactcatattcagcgggagcattgacgaggtgtttcacgtactccggttcattgccaatgggaatacggaaagcgcatgccagcccttccgctgttgcggctaacaatatgttttctacggctgcccaagccgaagcgaaatagttcaaggaactttggtctgcgggcttgcataagggatagtccttttgcctgaaaaacggcaggataaggcagttgctttggattagcatacgttgttgcttgggaagcgcatcgacaaacatagcatatccgtctttgtccattacgttctcggcggctttaagttgggtttgttgaatggttttggtgttttccgctacaggtgatataagtcgggcaatgttttcctgccctctcacgacaatgaactcgaactgtcgcagatggtcgttggtcggagctttaaaggctgccgataatactttttccagcacttcgtccgttacctccttattggaaaagtcccggatggttcttcttttctctaatacttgatagaaatccataacaatacatttaatagttatacttgttgttttcagcggcaaagttatattgctttattgtcgcatatttgttgtattgttttatgtaattgtcgtatatttgtatcgaaccattttatatacgactaccttatggaagagatgatcactccttacgaattgcccgaagtagagaaccattcattcttttttatagatcaacgaatagaaactcatgtagaagccaaattgcatcagcacgatgcatgggagttatattatgtgttacatggatacggaacccgaatggcaggcgatacgttacagtctttttcggctggtgatgtggcattgataccgccatccatgcatcattattgggaatatacccctttatcggcagacagtgacgggtgcgttcattacttgatggttgctttcagtcactctttcgtcgtgagatgcatggaggtatttcccgaattacgcaatcgtttagcagggctaacttttcctgttaacgcattaaagcttggtttggaaagctctcgtatcatacgcaaaatattattgcgtatgaacgatatggacgaattggggcgattgtgtgaaatgttccgcttgctaccggttctattcacttcatccgaccatacttttgcaggcaagcctatgaatgtagagcgggatgtgaggcgtatacagcaaatttgtacgtatgtgatggggcattatattcatcctatttcattagatgatatttctgccgaggttggtatgaaccgttctgcgttttgttcctatttcaagcgatgcaagggaatgacattctcacaatttgttacagagtaccgcttaaatactgcttgcgaacttctgaaacactcgcaaaagcaggtgtcggaaatctgttttgcagtaggattcaatgatgttccacactttaatcggatttttaaaaaattgaaaggagtaacgccacaagaatatagaaaaaaggggacttccggttaggcaatattttaggcttatgcgatattagtggagaatgatgttgtaagcgaaaatgcgataaccttgacgttttgtttgaaaatccgggattatgatgacagggcctttttgcgaatagaagaaatagggagtgctttatggtcaaattatccattttaccctgtttttttgtatgaatatctctattaggagacgaaagtaatgggattaggtaacgcaaaagccagtgttaggcaacgctaccgtatgtgttaggcgatacatacggtaggaattgggtacgcaacctatagaaatgggcgatgcatccgtatgaaaagcacctttctcctgcataaatatgagataggatgaattaatctcgctagaatgaaagggtatatttaagcaaagtgctataatacaattgattgctgatattttttctcgtatttggtaacagtatgtacctttgcccggaaaaaacgattctctggggcttcagattacatattgtcatattgtcaatttgaacgtattacttatctttctcgctggcaatgcgggcaatagtaaatgctgcctccgaggtaagcctctttctgtatccgttcgccacagacggggcaagggtcatggtaggtgttcttcgataggatcgtgcggtaattgcctaaggcgccgtatagatccttctccgtatcccggcctcctcggcgagtcatctcttccagcgtggatttcacggtgttgaagaggcggtctatatcctcttctgataaagtcgatatttttcgtttcggggagatccgggcattgaacaagatatcttggcagactccgttgcccaggcccggaatacgttgctcggtggcgagtaacgcctttgcggatatatctttcttgagattcccgatgagactgataaaataggttttatcgaatctctcgtccaacggacatagcttatggatgctaccttggtaatagggattgtcaaactcgcctttgaaagcgtagatggaaccatacatcgaaaccgtgaaagctaggaacgaatcgtcctcgaatacgatcataagctgatatttcttcggggccttttctgcggaggtataataacgcatattggttccgtctccgattaagaggtgggtatctgcgtccataaagatgtccacgaatgcgccatagccttggacgcctaggaccgttcgtcctaccagcctattggagtattccgccggatcgccattatagaacgtgaagcggtgaggactgttcgactcgataacatgcgctatccgtttaccctttagcgtttcgctagcctgtttgccaatggtggcggattcgggaatctcaatcatattcgtattgtttttagaggtgacggggtaaatataggcatattttccgtaccaatattcattgatacggaaaataggaaccggactttaattctgggtcggataaaggggctttcctgtctcgtccacatctgtccagtcttttacgttgacactggccaaagtgaccgaattaccgttgattaccgctttaaataaataagagtttcccgctttcaactcgccatccggaagagggatctgggtggtataggtgcgggtactgttttcattgtcggcggatatttccagcgtgagagtcataggagccgtatgtcttatcggcaacatgatatattgggcggttaatccgtttatgcccatcttatccgcttttccgaaggcggtagcaggagtgatgacacctgtgcccagatccatggtagccccaaccacaggaggagtgatcatggcggagaccagttggttgatcgtgatgccttcaccgccggttaattctactacgacttgggtagccacatgcccataaacaatcggtatattgatttgggagctatttacatcctgttgtatggcgctccaccaaagataatcgataccgttgaagaggggttcggatacgccactcgtgaatgtcgggggaatcgtggagaaattgtcggatacggcgtagaaattataagtgccattggagagaaacattttatatccgtcacttcctgttaacaccccgggagatgaggttatgtaaagacctgacgcctcggggcttcccttggttccggcgttgctgtcgaagacataaaccctgctttgtatccctttattcatgggagacatggaacgtaataggttccggccctccacggaggcgttgaaagtcaccaacgtactgtttcccgggtcctcgtttcccgaagagccgtttggggttgttccatcctcaaaaataatcgtgttcttgttgcatccggcgaggagtaacaggaacatcgtgctaaatgtaagcgcatttgccgctttcagtaaattccgtatcatataatttgtgtttagtgaatagtctatataatacattttgcgaaccgttttggttcagaaagcggcaaatgttttaaccttaatctatcggtttcacgtaagaccagtgggtttgtatgatcttccattggttgtcggggttgcgtctgtaaacctcggtgcagttccattttattaccttgtcggataagtagcaatcaaggttgaacgtgagaaccgctatgttttgcgtgacttgtacgatcgggcggatcatgtcgaaatgatccgccggaggaagttgcatacctttataataagtgcgcagttgttccaatccctctattttcgtctctagggaaggatcgaagtaaatcacgtcggtgtctgaaagctctacgaatgccatcgggtcggtcgaggctagggcctctttttcaagggagatgatcatctccgggatgttctcgtttaatgttttgttctccatattcttttgttgtgcgttagtggataacgtgcttcctaatatgggagccgctatccatgatttgtattgtctcatgatgctttatttattgatagaggcaaaattagacataccgaatggagttcgtataatacgtataaaggaggaaatagtactttttacggttttgtattcctgcgatagtttagcggggtcatgtttgtttgggaacgaaatagacggatgaaataggatggatcctcgtaacctagagcttccgttatggcggatataggcaagtctgtataagtcaatagccgtttactctcgatcagtattttatttaagatatattgttttgcgctgatacccgtagcgtttttcacgatctcattcagatagttcggggtgatgcaaagccgatcggcatagctccggatggaatgatcttgcttgaaggaatggtttactaactcgataaatcggtctacatagatgcttttagatcgggcgtttgtgtctggaggtaaagcgttcgagctagcgtatagcctgttgagcaacattaatgtctcgtacaacaaggcccggagcaagtgtttgtctttcgactgatagtccttgatctctttatcgatctccgagatcaactcggagatgcggccataggctttcttgtcgagactgagcttggaagaccgtctttccgtatggaaataagagaggttccggagaaatgccggatcattgaaaaaagagagcaggaactcttcctcaaagataagagcgaatccgtcttgtatcgttttatcgtcccatttacgtatttcgccgggccgggtaaagatgatatcttgaggctttacccggttcgcttgatgatcgataagaaattctccctccccactagtgatcaatgttatatcgtaatacgtcaatatatgtacgggttgttccttgagatacttcttgatcgtgttcaagggaacgacgtcgataagtagctcatcgccgtatttgtgtttatagaagtcgtattgcggtatattaagattcatctgctcatgtcttttatttgaaaagcataggagcgaattggaggagataagcccgccaattggcccagatatgccctcgggtggattctacgtactggtatttcatacctaggctatccattcgctggcggaattgctggtttgcgtcgtacaggaaatcgtcctttcctataccgatccagaacaattgataaccggatctcttgaggtttcctaacttctcgtcgagattcgtgtacatcgggctattcgggtctacaccattggcgctgagtccggcggagaaaagtcctatatagttaaaatagtccggataattcaatgatatatataatgtatggaaaccacccatcgaaagtccggctatggcccggtgtcgcttatccgggatcgtacggtaacggttatcgatgaaatgaatgatctcggtgaaactcttctcgtacgagccatccttataaccggggaagctgttgctcatggccggcttgtaattcaggttatcgggcgtttcgccgggagcggcctgtttgctgggattaccgtttggcataacgacaagcattggctgtatcttgccttcggcaatcaagttatccatgatacgggcggtacggccaagctccagccaagcgttctcgtcaccgccactgccatgtaacaggtacagaacgggataagactggatgttcttatcgtaaaaaggaggcgtataaacgctaagtcttcgttcgctcccgaggatgtccgagtgataccaagtggttgtaacattgccatgaggtacgtcacgtacttgataataatcaccatttcccccgttgatatagaacaggctgaacaaggtgcctacgtcacggcaagagaatgggttgtttggggcgatgttgtaaataccatctatatttaaacgataggtgtacatttcggatggcagtgggggagtcgtatagctccatgtaccgtttttccctttcgtcatctggccattgccctcgctggcttcccagtcgccttttacggaaacagacttcgcctttggggcttctacatagaaagtgacgctattgtctgggttgatcacgagaggttctaccttatcggtcttgaatcctacgttctgttgggcgaaagccatggatagcggcagtaagagagccgcgagtaatgctagtcttttcattttatctatacggtttaaagaattaagttatagagacaaatatacgatttatttcggaaaaatagaagttatacttacttggcacttgtagtatatctttttgggtaaagtaagtatatcttctttagtacttgctgtatatattcttttcaggttaggatgattcttgctgattataactaatacatgatttcacgttactacctttgcagctcttctattgttaattagtcttatgtgtttgcacagtatttgttgttttgtgcggcacatttttattaaaagtgtgcagtgtttgaaaaaagtatttatctttgcgaccgttttgtaatcaagaaaagtaaaacatgaagaaaaaagtagtattaggtgcggcattgatgatgatgcctttggtttctttcgctggaggatatttgacgaatacgaatcagcatgcagcctttttaaggtcactttcgcgaggtgctgcaattgatatagacggcgctttgtcaaacccggcgggtctttcttttttgccgacagacggtttccgcgttggtgtgagtatccaaagtgctttccagacccgggatatcgatgcctctttcagtacatacaatggtttcgacccagtgaataaggtgccgacagtgagcgacgttccctataaaaagtattacaaaggaaaggctgccgctcccgtgattccgagtgtttttgcggcttacaaaaaaggtgattggacgatctccggtttctttgccattacgggtggaggtggtaaggcttcgtttgacgatggtctgccaatgttcgaatcggctgctatggccggtatcttccaggaaagtgtagcgaaatatataaagactggcggtcaaagtcccatcgtcacgccggatatgtatactattaacagtgcgatggacggaaaacagtatatttattccctacaacttggcctgtcatacaagatcacggattggctttctgcctttgccggaggccggatgaactatttctcaggaaactatgacgggtatctggatgcaaaattaaaacagaattttggtggagcagatttaatgaacctggctttggattgcgaccagacaggttgggggttgactccggttttgggtgtcgatgtcaaatatggtaaattcaatttcggagctaaatatgagtttaagacgaacttgaacatcgaaaacaataccaagaagttggattatcccgacagtgcggaaggtttggttggcccttataagcatggtgtaaatacgccgaacgatattccttccatgctttcggtggcagcttcttatcggtttttgcccatgttgaaggcttctgttgagtatcacttcttcgatgataagaaggcgggaatggccggtggaaagcagaaggaactggaaagaggtacgaatgagtatctgtttggtatagagtgggatgttgtcaagagattgaccattagcggtggcgctcaaattacagattatggtttgtctgataatttccaaagtgatgttagtttctcctgcgattcttattcgctgggctttggtgctaaagtgatgttgagcgaaaaaatggctttgaacgtgggatatatgtggacaacttaccacgattataccaagaagatggacaactactgcggcacgggacttcctgggcagaatgtgtatagccgcaccaacaaggtgttcggattaagtttggactacgctttctaagcttgaaaatattcgtatcctattgaaaaaggaagctgcctgtcgtgtggcttcctttttttaattcatgggtattcaacggactatatgaaaccctatgcattacggctcgtaaccataggttttagtcgctgtaaagcatagctgggtatggcataaaaaaagagggtgcatgacgcatcctctttcttgattatttgttttacttgttgccgattataactgaatccaacgtacataagcgaagtccatacggtgaggcaactccttgtttacaggatatacacggaagcctatcttatggttaccagcctcggaaggagtggtcgttaacttgaagaataacttggagccttcttccttcatcaactcgaactgagcggtattgattggtgacagcgtgtgtttctccggatcttccttcatgacaaccatttcagcacctaacataccttgtagttcatgacggtcgattaccaaattgaagttgtattcttttcctacaaccgggccattcaccgtcaaatcttggtcgcaagtgaaagattccacttggaagctatcccaatgttgcgcaacttcctctttccaagcagctaattgcttagcgatctcgtagttgttagcggaaatatgagcggaacgagtagccaatttgtgatagaaacgatcctcataatcgtccaacatacgtttcatcgtataatccggagcgatcttggcgatagagttcttgatatattggatccagtccggagagtaacccttgctgttcttagcgtagtaagtcgggatgatctcagtttccaagcaatggtagatcgtagccgcatccaattggtcttggtattgctggttctcataagtacgcttgtcggtcaatgcccaacctgcgccttctacgtaaccctcataccaccaaccgtcaagaacggagaagttcaatacaccgttcatctcggctttctcaccggaagtaccggaagcctctaacggacgagtcggcgtgttcaaccatacgtctacaccagaaatcaaacgacgggccaaacgcatatcgtagttctccaagaagatgatctttcctaagaactccggacggcgagagatctctacgatgtgtttgatcaaaccttgaccaccaccatcagctgggtgagccttaccggtgaatacgaactgaatcgggaatttctcattgttaacgatcttagccaaacggtctaagtccgagaacaacaagtgcgcacgcttgtaagtagcgaaacgacgaccgaaaccgatcagcaaggcattcgggttgatcttctctaggatagaaaccaccttggaaggatcaccttggttcttcaaccagctatctttatattgaacacggatgtaatcaatcaatttattcttcaaggtcatacggagattccagatttcctcgtcggatacattctggattccttcccaacatttgcgatttgattgatcctcgaaaagcttcgtgcctaatttatccgcatagaatttcttcacctcggtagcggcccaagtcggcatatgtacaccgttcgttacataaccaacgtgcagttcatccgggaagtaacctttccaaaccggggcgaacatgcgctgagaaaccttaccgtgcaaccagcttacgccgttagcctcttggcaagtgttcaaggcgaatacgctcatggagaatttctcgttagaacctgggttctcacgtcccatgtcgatgaaatcttgccagctaatacctaacttgccggggaactcacccatgtaacgtccgaacaaaccctcgtcaaagtaatcgtgacctgccggaaccggagtgtgtaccgtatagagggcggaagcacgaactacctccaacgcttggttgaatgaaaggccgtcgttctggatatagtctaccaaacgctgagcgttgatcaaagcggcgtgtccctcgttgcagtgataaatttgtttcttgatacctaacttgttcagcatcatgataccaccgatacccaacaaatactcttgtttcatacggttctcccagtcgccaccatataattggtgcgtgatggaacgatcccattcgctgttctgaggaatatccgtatccattaagtacaaaggtacacgacctacgctaactttccagatatgagcgtaaacggttctgcccggataaggaacttccaataccattggctctccgttcgactgcaatacctgagtcaacggcagggcgttgaaattttgcggctcgtaattggcgatctgctgaccgtccatggacaaagtctgtgtgaaatatccgtaacgatacaagaaacctacggcacataaatcgatattgctatcgctggcctctttcaagtagtcaccggctaatactcctagaccacctgagtaaatctttaatacattggtcaaaccgtactccatgctgaagtaggctacagacggttgtgtcttgtcgggttttacattgatataagctttgaaatcagcgtataccttttggatttcagccattaactccttatctgctaagatctcttccatacgtttgtgtgaaaggctttgcaatagctgtacagggttaccttctgtggatttccaaagttgtttgtcgatcttgccaaatagtttagcgccttcatgattccatacccaccaaagattcgtagcgatctcattaagtggttccaactgttgtggaagcttggaatgtgagtagacgtccttccaaataggactgtttgcgttattcgccttaattttcattatcgtgaagtttaaagtgtttgtctaaaaacgagtgcaaagatagcattatcttattaattatgagcaatatttagctgtttctttcctcggcatgctttatggcgatatcgaatgcggtcagataatagtcgataaacttgctccattcagcttttcgagcgagatcgaaacaacgctgtttgatttcctcgatgtccgtagcatccttttggctgagagccaggatggagttcatgatagcgtccgctacctcaaaataattgaaatccgtacgattaataacctctacgccttcgctaaggttatctccggataccgttttcttcgcccacataccgaaaccggccagattggtcgtgatcgtcggtataccgaaagcgatactttccagcggggtatatccccacggctcgtagtaggaaggatatacggtagcgtccatccctatcagcatatcataataggtcttattgaaaatacctcctttaccgtccaaataacaaggaacgaatatgatctttagtttttcggatgccgcgttcgtgaagccggcgtggttgatataattcaagaccttatcttctggcatattatgcaaccagtgcgtaatgaaagggatttgaagcggagaggtcgtctttatgtcctgctcgatcgcctcttttaaatccgcacgggcagcacgtacccaagccggtaccatgataaaggcgacgacctcacgctgcaggcgtccggacgtacgtacacggttcatcgcctcgatgaagacatcgatacctttatttctgtattcatagcggccactggtggaaaccagcaaagcgttcgggtcgatggaacagcccaataatttctccgctacattaattaatgtacgacgtgcctccttccgctttttagcgtattccttaccctcgggtacgaagttgggctcaaagccgttcggggtaacgatatccggtgccttatccaataactgtttacattcacgggccgtgatatcgcttacggtcgtgaagcaatccacgtaatgggcggcctgcttctctacggaatgcttggcctccatgtttagctccttagccatctgatcgccgttgtaaccgtccatataagcgtataacgctttgttgttaccggcgatagagcgtccgatcgatgtggcatgcgtcgtgaaaagtgtcgctatggcagggatttgcttttgaatgtaaagcgctcccatcgccaacatccattcattgaatagggcggcgactttcttgttttccagtttgtagaagtgatagaaactctctattaccttaccgaccgcatacgcgaagatacaagactcatcgtaatcgccgtaggcgtggatggagtcaactcggaaattttcccacatagaatagaaaaaggcgtctcgttcactgaagtaggacttgaaatctaccagtataacagggggggtacccggtacgttccagcgaccaaccttaactttcaagtgatctactgcctcggcgtgctttctccaatcctcaaacaaagatgcgtcttccgtaaaatcgggagcggttgtgtttgcccacacatccggaccgatgaatattactttgtcgttaaaaatttgttgaagcgtatgagctttagtcgatagtacggtataaatacctcccactttattacagacttcccagctgctttcaaagagaaactctggcgtctttatcatttcgttcatatttgatttgtttataatcaatgatttcaccgctgcaaagataattcattttatgttttttcttggcctttcctcggtatttaataacatatgttctatatttgtggataattaaatatgaaataattatggctaaaagaagaattttaaagaaagagatcagctacgtggctggtgaattgttcacggaagcgctggtttgcaaattgtatatacccggagtaaatcaagagaaagcggatgctttgatggctcgtatcctagatatgcaagatagttatatcgttcgtgccggacaccccgacggcaaggataacaaggctctcgtacggaattattatcgcaaattaagagaggacttgcaaaacgaggttaacgctatcgccgacgagataggagagttgagcaaggacaaataggcatgaagaaggcaattagtaaggcgatactccgtatggcggggtggaagctgggcccggtggatggcgtggatttgccgaaatgtatcgtatgtgtggctccgcataccagtaactgggattttatcgtagggaaacttttttatacctcgatcgggtgtaacgccggtttccttattaagaaagagtggttctttttcccttttaatttgctgtttaactggctgggaggtgttccggtggatcgtggtaaacgtacgtcggtgaccgatcagatggtggaacgtttcaagaccagtgagcggtttcaattggccgtcacaccggaaggtacccggaagcgggccaaggactggaaaaaaggattctattttatcgctttgaaagcgaacgtgccgatcgtggtggcttattttgattatggaaagaaagaggtgggtacgaaaggtgttttttatccgacaggtgatgtggataaagatatccatacgatacgtgagatgtatcggggagttaccgcttgccatcctgagaatttcgtacaggtataggagttttatggtgaagaaataagagttttactataggaaaacaaaagttttccctaagagaaacaaaagttttgctatgaagaaactactgtttcttcaccatgaaactgtttccttgtcacaatatgtctttttattaccttaatatctttattctatgactgaagacttacgtatcagcatgatacaatcccatatcatttgggaagaccgtgaagagaacttgggttattacggcgaactgttgcgccgtgttagtggaagaaccgatttagctgtattgccggagacgtttaccacgggattttccatggacgtggagaaacaagccgatacgatggagggccagaccgtaccgactataaaggaatgggctaagaaatataaactggccgtggccgggagttttatcgcgaaagataacggaaagttctacaaccgggcttttttcatcactccggaaggagaggagtattattacgataagcgtcatttgttccgtatggcggaagaggacaagcatttctcggcgggcgacaaacggctgatcgtgccctataaaggctggaatatctgtttgcaggtttgttatgacctacgtttcccggtttggagccgcaacgtaaataacgaatatgatcttttgatttatgtggccaattggcccgaggcccggaagaaggcgtggaaggcattgctgcatgcccgtgccattgagaacatggcttatgtctgtggcgtgaaccgtgtgggggtagatgggaaaggttttcttttcagaggggattccatgatttataacgcaaaaggaaagaaattggctgatgccggaaaacgggaggaaatcacccggacatgtaccttgaagaagagcgagctggatgagttccgggctaagttcccggcgtggaaggatgcggatggatttagtattgacttctaatcatctgattcctgctgattatggaaaaacgtagtccttgggcttggatcccgtctctttatttcgccgaaggcttgccctacgtggtagtcatgacgctttctgtgatcatgtataaacgtttgggcgtctcgaatacggatatcgccttgtttaccagttggctttattttccttgggtgatcaagcccatctggagcccgttcgtagacttgataaaaacgaagcgttggtggatttatggcatgcagttattgattggtgggggaatggcaggtgtggcgttcgtccttcccggggatttctttctgcggtttaccttggctttcttttggttgatggcgtttagttccgctacgcacgatatcgccgcagatgggttctatatgctgggcttgacggaggagcaacaggcgttcttcatcggtatccgaaatacgttctacagggtggcgatgctaaccggacaaggtctgctggttatgctggcgggacttttggaggagagtaccgggcggatttcctttgcttggagcctggtgtttttcgtattggccggtacctttatcgccttggccttgtggcataagtatatcttaccccgtccggcgagtgatgcgcaacgtacgaatatcacccctcataccatcttggtggagtttggcaatactttcgtgagttttttcaacaagaaagggattgtcccggctttgctttttatgctgacgtatcgtttgggggaatcccaattggtaaagttggcttctcctttcctgctggatgggcgggaagttggcgggctggcgctcagtaccggtgaggtcgggttcgcttatggtacggtgggagtgatctccttattgctcggaggggttttaggaggcctggctatatcccggagtggcttgaagacttggttatggcctatggcattggctatctccttgccgaatctggtctatttgtatatggcctatacgatgccggagagtattgttgtcgtaaacgcttgtgtcgctgtcgagcaattcggctacgggtttggctttacggcttatacgatgtatctgatgcttttcgccgagggggaatataagacttcgcattatgcgatcagtaccggtttcatggcgttaggtatgatgctaccgggaatggcatcgggatggatacaggagcagatcggttaccaacatttctttatctgggtaatgatctgttgcatacctttatttattgtattgccgttcttgcgtttcaagaaaaaataatcttataccgataatccgggagtgtagggaagggtcacgatgaatgtgctaccttccccttctttggattctagggtgatatatcctccgaagtgctcgatgataatttggcagatcgccagtccgaggcctgtcccttgcgcaaactcgtccagtttgttgaaccgttcgaatacttgggcttgcttatctgcgggaatgcctttgcccgtatcggtcacggagatctggatccaacgtttatcttgcgtataatcgtatttaatcaagatgtatccttgcgtcgtgaattttgcggcgttgtttatgaggttggtaatcacttgggttaatcgatgtaggtccgcttggataatggccgggaggaccggcagttgtattttaagcgctacgccttggggcatcaacaattgatgggtgcggtagatatgggatagtaattcgtttaagtcacaattcgtgagggtaaacgacatcttaccggactcgatgcgggatagatcgagaatgtcattgatcaatttcaataagaggtcgctgttcttactgataacttgcatgaactcatccctctcgttcgggcttatttccatatcgcttgttagcagttccgaaaatccaacgatggcgttaagcggggtacgtatctcatggctcatattggcgaggaacgctgatttcatttggtccgcttcctcggcccttatacgggctttgataagatcttcctctacttccttactttgttggatatttaagcagagcccgtttactccgacattattgcgggtggagtcttgtccattcttcgcttgcgcatatctgaattcccaccatatatgccctttgccgttgaaattatatcggcggcgggtgatcttacgggaagggaatcctgtatcaagcaggtgcttatgttggatgaaatcttcccggtcttcagggtggatagactcttggaattgcgtggaggtgatcggctttatcggcatatccaacgacttatagaaatcatggtcgaactcgaatacgccgttgctgtatcggaatgcgaaaatatcaccgctctctaaagccaacgagaggaattctttctctttccgtaaactttcttgagcctgtttcttgtgagaggcttcgcgacggtattgtactctttgatagaaaagtgtccataggataaatagggttagaagaatcccgcatagaataatatatgtttgataacgaaccacaaagggcatattcaagaagatgctgttttgaggcagttctttccaatcgataccccatttatttaaagtcgggtaatcgaacagatagtttttggcgctttccgttatttgtgggaagctattggccggtgtgcccttgagtatgctggcagctcgtcgtaaggcttcttgggtttggctctctaccggggtcatatatcctccgatgaagtctccgtcatatcctacggattcgttgatcgccgagaagctgggaaatgagcagaacctacctaaggctatcgaggtataatctcttttggtagcaaggtaggccttgttgtaagtacttgtacctaacccccagatcaagttggaactggtgcggggttgaatggtttgtatatagagggaatcgaacggtacttttgggaaccgcactaaagaagaggatctctttttatcggatggggatgaatactggggatatttaaggtaatcgggtctagccttggagcatagcccttttatttgctcatccatatctttcaggatctttttgtcaagagctgtactatcagagacacgtacaattacgcattttcccatgattcgctcgataagttcgacgtttttccgatagtccggcttatcccaaaatccggatacgttaggatacttttgaattaagggtatgtttgggtagttgactccggtaaaaacgataggtacgctatctaataaaggatgttcgcaagccaataaggaataggtcgcttgatcatcgtttacgattatgatatcaggcttccataaagataacgtattgagttccgtatatattctttgtttctcttctagcgattgataagcttcgcaattaagatagaacgtgaagatactagcaggaatgccttccttctggaatccttttttaaaagcctcttctatatctttataggcttgaaagtccggctcataagattggactatcaagatacgcttttccgtggttgagcgttcgcaagaatttgcgaccaatagaaataatggaagcaacaataaaaaaagataacgataagaagtgttcgccatgtgtatagcttcaatataataggtacaaatgtataaaaagtaattggatatcaaagagacaaatgtctatttttcttggcttctgaggttggtttataattcgaaaaccaaggagatgcggcaccccttattcttttcggacttgagcaagatacgcccgtttaattgttttacgatagcttggcagatcgataatccaagacctgttccttgcacgaaatcatccagcttcttgaaacgctcgaatatcgcttcttggtcctcgggagagatcccgatgcctgtatcctgcacataaagtcggacgtcttgtgcgtcagcggaatactcgtaaccgatctctataaagcctgcggaagtaaattttatggcatttttcagtatgttctcgagcgcttggtaaagtcgctccttatccgaatataagcagatcggcgtatcggggcatttctccttgaattcgataccttcggggacatcggaaagatgttgtttataaagggttttcactaaatccgttaaattgcaggattctttatgaaagacgatacctccggattcaatccttgccaaatccaatatgtcattgactaactttagtaataactcgttattggtcgtgatgatattagcgtattgctccttctcttccgccgtcagatccagttcggcgattaggcttgaaaagccgatgatcgcatttagcggggtacgtatctcatgactcatgttagccaagaatacggatttcatccggtcggactcattggctttctccaaggcttccgctaatgattccttttcatgtaatagggctttttgcgcttgtcgttttgccttggattcttgggtatacatgatgatgaagctaccgaagacaaagcagcacatcgtgctaactaggattatcaagctccagaataatcttggatattggtccttaaaaggaaagttcaaaagtatagcatccttcggaagaagccttttatcgatattccaatatttgacttcattgaaatcaaatacataattcttcttgctctttgttatctgtgggaatgattcgctagtggagccttttaatatttccgcggctctatcggtagattcttctatttgggtttccaaggaggtgatatagccacctacaagtttattcgaatatcctagatcctcgttgatcgccgtaaaagagggtttactggaaaaacggctggtgttcaatacccggtaatcccgtttggcctgtagatagtagatgtaagggacgtgtttactcatgtaccaagaaacagctgatagcttgtctccttgtacgggcacgatgttgacggtcgtactatccggccgctttaagctttgattgaccctttccaaagtagcgatctctaccggtatatacatgatacgattattatcgacccgaatgtctacttgagcacattgctcatgtaacgtagccttaatgtgcctatctatatacgtactatcgtgcaacatataaatcgtagacttgcccaacagatgttctatcaagcggatgttcgtgacgtagtcgggctcgtcccagaatccggaaacattcgaatattgcgccaatagtgccttattggggaaatttacgccgccaaatacaatgggaattgtagaaattagcggatgatggcattgcattaacgtgtaagtcgcttgatcctcgtagaccaatatcagatcgggtttccaagtggagatcgaatctagatacaggtacatccgtttttcttcggcaggtgccgcatattgctcgcagttcaaatagaatgtttggatcgacggattaatcccctttttctcgagggatttccggatcaaccgatcgcagtctttataagctacatagtcgctttcataggaatggactactaatatacgatatttatttcccgactgttgacaagaggactgtagaatggctagcagaaaaagtagaacaaatatgtaatatttctgtatagatctcgctagcataagtcgaaaattagtacgttgcccttaatcgtaatttaaaatgagtgtttttatgcgagtgcaaacttattaataattattggatatcaatggcttttttattgaatatatagggctaaaataaaaaacggctatcagatcccgaaggacccgatagccgtttttctatcttatgtagagtaaaggagcgattaaaaccgcttctttttattttacttcctcaaagtcaacgtccgtaacgttaccgtctttgctgttgttgctgctacctgcgttaccgccagcttgttgaccaccgaagttaggatctgcttgcggaccgccttgagcgccgccaccttgagcgttgtacatttcttggctagctgcttggaatacgctgttcaattctgccatagcagcatcgatacctgcgatatcctgagccttatgagcttctttcaatttgttcaaggcaccttcgatcggagctttcttgtctgccggaagcttgtcgccaagatctttcaattgtttctcggtctggaagatcatgctatccgcttgattcaatttatcgatacgctctttctctttcttatcggcctctgcgtttgcggcagcctcttctttcatacgcttaacctcatcatcgctcaaaccgctggaagcctcgatacggatactttgtactttaccggttcctttatccttggcggatacgttcaagataccgttggcgtcgatatcgaatgtaacctcgatctgagggacaccacgttgtgcggcaggtattccatctaggtggaaacggccgatagacttgttgtctttagccaaagaacgctctccttgcaagatgtggatctcaacagaaggctggttgtctacagcagtcgtaaatgtctcggacttcttggtcgggatggtcgtgttagactcgatcaatttagtcattacaccacccattgtctcaatacctaaagacagcggagtaacatccaacaacaatacgtccttaacctcacctgtcaatacaccaccttggatcgctgcacctacggctactacttcatccgggttaacgcccttagatggagctttaccgaagaatttctcaacgacagcctgtacggccgggatacgagtagaaccacctaccaagatcacttcgtcgatatcagaagttgataaacctgcgtctttcaaggattgacggcacggttcgatacatgcttggatcagaccgtcagccaattgctcgaatttagcacgagtcaaagtcttaaccaagtgctttggaataccatttaccggcatgatatacggcaagttgatctccgtgctagtcgtacttgacaactcgatcttcgctttctcggcagcttcttttaaacgttgtaaagccatcgggtctttacgtaaatctacgccttcctcacgttcgaattcttcagctaaccagtcgatgattacgtggtcgaagtcatcaccacctaggtgagtatcaccgtttgttgattttacctcgaatacgccgtcacctaactcaaggatggagatatcgaatgtaccaccacctaagtcgaatacggcgatcttcatgtctttgttcgtcttatccaaaccataagccaaagaagcggcagtcggttcgtttacgatacggcgtacggttaaacctgcgatctcaccagcctctttcgtagcctgacgttgagcgtcactaaagtaagcaggtactgtgataacggcttccgttacttcctgtcccaaataatcctcagctgtctttttcattttctgcaggatcatcgctgagatttcctgcggagtatacaaacgtccttcgatatctacacgaggagtgttgttatcaccacgcactactttataaggaacgcgattgatttccttttgtacttggtcataagtttcacccatgaaacgtttgatagagaatatagtcttttcaggattggtgatagcctgacgttttgcgggatcacctaccttacgctcgccgccttctacgaaagctacgattgaaggtgttgttcttttaccttcgctgttcgcgataacaaccggttcgttaccttccaatacggcaacacaagagttggttgttcctaagtcgattccaataatctttcccatgattgtaaatattttaattgttattattcatcgtccgtcatcctccttgtttaaaggattcacatagtattcaacaaatgccgtgccaaagaagtttgggtttgaaaataaataatacgtgtcatgaatcgtgacattttgacggtttggcagaatacagaaagccccggaaccgttttaataggcccggggcttctcttgttatttgttgattatttccttttcttctttcatgtcaagctcattcttgtcggcatcaaagaatttgtattcaagaaaggcgagactttgattgggaataacttttaaaccatgtgtgtacttcattttccacttcatgctcaaggggaacaaccccttgttcacatacgctgcgacatacggatgtacatgcagggtgaatttcttcacgtgatgtttgtttactaagcaatctattttttcttccaggctgtcggtaaacaggatggaaggcttaaccgttcctgttccgaaacaggatgggcagtcttctgacgtatccacgtccattgccggacgtacccgctgacgggtaatctgcatcaagccaaacttactaagaggaaggatattgtgtttagcccggtcatttgccattgcctttgtcatgtgttcaaatagcttttgccggttggcagcctctgccatatcgataaagtctatgacgatgatacctcccatgtctcgtaagcggagctgacgggcgatctcatcggcggcggctatatttacgtcgatagctgtcttctcttgggcatcgctgcctttggaacggttcccgctgttcacgtcgataacgtgcatagcttccgtgtgctcgataatcaagtaagctccactcttgtaagtgacagttcgtccgaatagcgacttgatttgcttggtgaccgcaaagttgtcgaagataggaagctctcccgtatataactgtacgatttcttcccgtcccggtgcgatcaagcttacatagtcgcggacattattatagacctccttgtcatttacataaatattttggaaagaggggttgaatatatcccgaagcaaagctacggtacgtgccgtttcctcataaataatagccggagctttgagtttaggcaccttcacgatattatcttcccatcgtttcatcaatgtcttcaattcatgatcaagctctgcgacacgcttgccctccgaggatgtccgtacgataacactgaaattcttcggtttgatactttggattaactggcgcaaacgggctcgttcctcgcttgatttaattttggtggagacagatactttatcggcgaacggtatcagcacgatatatcttccggcaaaagaaagctcggaagtcaatcggggacctttcgtcgagataggctctttagcaatttgaaccaacacctcttgtcctactttcagcacgtcgctaatactcccgttcttttcgatctccggtagaatctgagttttcgacagtaccggcgcctttttgggatcgctcagcaattgctttaaatatttctgttgggtgttgaagttaggacctaagtccaaatagtgaagaaacgcatcctttttgtaaccgacatcaatgaacgcagcgtttaagcccggcatcagtttcttaaccttacctagatagatatcaccaacagcgaacgagacgttgcgggcctccttttggagctccacaaggctcttgtcctccaagacggcgatagatacctctttgggctgtacatcaactactaattcactaatcacttaagatgtgtttttaagatcagaccttataaaatacgcaaagaacaaacttaaaaggtcacttattaagtttgttctttagagttcgttagatagacttatttcttcttatgtctattcttcttcagtctctttttgcgcttgtgcgtagacattttatgtctttttcttttctttccgctaggcatcgctttaaaattttaaattaaacgtataataattaattacttaacttcaccaataaaagtcttagccggcttgaatgacggaatgttgtgttccgggatgatgatcgtagtattttttgaaatattacgagctgtcttttgagctctcttcttaataacgaaacttccgaaacctctcaagtaaacgttttcgccttgggctaaagaactttttacgatatccatgaaggactcaacgcttgctagcactgtctgtttgtcgataccagtgctttttgaaatctcgctaacaatatctgctttagtcatgtctataaattaattaattgattttgacctattaattttttggaatgcaaatatatagctttttatttaagtggaaaaagaattgagcttcaatttttaaataaaaagattcttctcgattcgtaatatatatgtatgtttgcggtaatcaaatagttatgatgttgaaaagtgagaaagggagcagttatgttacagtatgaaagtgagttagaaatcagccggatattggttgagtggtatgaaacctataaaagagagcttccttggagggaaacgagagacccttatatcatctggatatcggagattatattgcaacaaacccgggttgtacagggattggagtattttttgcgttttaccgaacgtttcccggatgtggcatctctagcggtggcggaagaggatgaggtgctgaaatattggcagggcttggggtattatagccgggctcgtaacttacatgcggcggctaaatctatcatggagcggtttaacggggttttcccggagaattataaagaggtattatccttgaaaggtatcggggagtatacggcggcggcgatcgtctcctttgcttggaaccaaccgtgtccggtcgtggatggaaatgtgtaccgggtactttcccgtttgtttgccgtagatacgccgatcgacaccacgaagggtaaaaagcaatttgcggaactggccggaatgatcttggaccctaagaacgcagggacgcataatcaggcgatcatggaattgggtgctttgcaatgtgttcctcaaaacccggactgcggggtgtgcccgctaaaagataaatgcgtggcgttcgcttccggcaatgtgcaagcttatccggtgaaacaaaataagacgaagacaagggatcgttatttccactatctatacattatatataaagaacaaacttggatgaacagacggacggggaaggatatctggactggtttgtatgaatttccattgatcgagacggatcatgcgatggatttttccggtttgtgtgagacgcaagccttccgtaacctattgggagatgctggaaaattgagtatcacccaagggttatcgaatgtaaagcatacgctctcccatcaaattttatacgcttctttctatcaaatagagatagagcaggttccggaatccttggggaattacctctctctgccttgtcgggatattgagaagtatgccgttccccggctgatacatatttatttagagaaattaaacggaaacttgtgagaatgattgaatttgtgtttctttgtatggttattaagaatttgaattatgtcattgaataaggttatattgatcggcaacgtaggcaaagatcctgacgttcgctattttgacagtggtgccgctgtcgctaatttcccgctggcaacctcggaacgtgggtatacgttggcaaatggaacggtggttccggaacgtacggagtggcataatatcgtagttcgtcgggatttggttcctttcgtggaaaaatgggtacgtaaaggttccggtgtatatgtggaaggcaagattcgtactcgtaattatgatgaccaaagcggcgtgaaacgatatgttacggagatccatgcggatcgtatcgagttttacagcacgggttcccgtccggccgatggtggaaatacgactgcacaaggcggtagtatgcagcccaatgtgggacaaggacaaccggctcaaccgaccacggcgccaaataccgcttatcaacagccagccgcctcgcagcctagcgcattctcagaatccagtgacgcggatgatctcccgttctgatattgtttaactaatactgtttcccttggactcggactattatttatggggcttatttgaaaacgtaacggtgcaggcgctgacagcgggtcctgtgatcgcattaagcctcgcttttttactgctgtttgtttccggcttcgtgtcggcctctgaagtggcattcttttctctaaccccgggtgacctaaatgagatcggggaagagaatcgcccggcagatcctgttatcaaacgtctccttgaacgttcggagtatctattggcatctatattgatcgctaataattttgtaaatgtggcggtcgttatgctgtgtacctatgcgattaacgcttggattaatttctcggccgctcctcttctaggctttgtgcttgagacgattctcttgactttcttgcttttactttttggggagatcatgcctaagatttacgcacagaagaattctttgcgttttgttcgtttttcagcctccgtattaagtggtttggaacgcttctgccgcccattctcgaaaatcttggttaattccacatcggtcatcaataaagcgttagcgaaaaagaaatatgatatctctgtagatgagctttctaaagcgttagagctaacctctaccgagatcccggaggagaaggagatgctggcggagattatcaagttttataataagaccgctgatgagatcatgactcctcgtctggatatggaagatatcgagatcaagatcagtttccgtgaggtggttgattttattatcaaatccggctattcgcgtattccggtatattccgagactgaggataatataaaaggtatcttatatatcaaggacttattgccctatattgacaagcccgatacattccgttggcagagcttgatccgaccggcctatttcgtgccggaaaccaagaagatcgatgatttgctggaagagttccgtaccaataaaattcatatggcgatcgtggtcgatgagtttggcggtacctccggtatcgtgacgatggaagatatcctagaggaaattgttggagagatctccgatgagtatgatgaggatgagcaacaattcatccgtttagcagacggtagcttgatctttgaggcaaagatattattgacggatttcttccgggttatcgatgccgatccctcagattttggtaaattgacggaagaagtggaaactttggccggtcttttgttggagataaaaggggattttccacgccgtagggagattatagattttaaggaatatcgtttccaagtgctggaagtggataacaggaggatattaaaggttaaatttaaccgtatccttgaagatacagggaatgatgagaatgggaaagatacgaagtaaatgtttatgaaatggatagctgctgtcataggaggttctctgtttttagggatatgctgtatttcgtgtgtggaatatacgccgaagccacggggctatgttcgtattgaaccttcgaaggcacagtataaaccgcttgatctcagttacctgccttttaattttgatgtctctcagactgcggtcatagaggttccggatcaaaagaagggtgttacgggcttgaatatctcgtatccggagttagaggctaagctttattgcagctatttgccaattactcccgcgtccttggtgacggtggaaacggaaagccgctctttcgtcgcccgcctgataaagtcggagaatcggatatcggagaaagcgtattccaaccctgccgcaaacgtttatggctcgttgtttcttctggatggagaatcggcttctcccatacaattcctgttgacagatagtgtatcgaatttcttccggggggccttgtattttgactgtaaacccaatgcggattcattagctcccgctatccaatatatccgggaagatatcatagaacttatacaaacttttagttggaaagaataatatggccttgctatataaacaactctcgccgctgcatggagtctggaaaatggaagaaagctctgatgagcttttggggatgcttgagcataaagcggactattcttcttttttggagcgggtatcggcagagaagcggaggcaggaacgtttcgccagccgagtgcttttaaaagagcttttaggagaggaggcaagggttgactatcattctacgggtgccccgttccttgcgtgcgtacctttatatataagtatatctcatacgaaagattatgtggcggtaatcttggataagcgtccgacagggatcgatatcgagtatcgttcggaccggatcttgaaaatacgaagtcgctttatgaatccggaggaagaggcgggtatcgatctggagcatgaggtcgagcatctattaatccattggtgcgccaaagaaaccttgttcaagataatcgggcaggaaggagtggactttcaaaagcatcttcacgtgaatccttttccttatttatcgagtgggacgtttaagggacgagaaacccggaccgaggcatgccgggaatatgagttggcatatcaagttacaccggactatgtattgacttggttgaagtaagttaacttcatacgcttgtgaagttaacttcattgactaacgaagctaacttcattggctcacgaagctagcttcatcaaatcatgtggttggaaagatatcgttcgatctatttctgccagatctcccaagcggcgaaagcctgtaatagaagcatttccagaccatttttcacgacggcgcctttttcttttcctttcttcatgaaaagggtctcatccggattgtaaagtaaatcatacaatagatgattcggcgtaagtaaatcgtacgggatatccggacatgagtctatattcgggaacatgcctaagggagtcgtattcacgatcaccgtatattgctccatggtcttcggagtaatctcatcgtacgtgatacaaaattctttcggtttgcgagaaaccagcgtggcaccaacacctagctgtttcagtccatggaagactgcctttgacgcccctcccgtaccaaggatcaacgctttccggtgcgtttctttcaataaaggatcaatcgattgcttgaatccgataatatccgagttatatcctttcagtttaagtttgccgaaaagaccttttgtgaacttgatgacatttaccgctccgatctgacgggcatcgtcatccaaatcgtctaaatatgggattacttgttccttataaggaatggtcacgtttaaaccgttaagttcagggttttctttgattacgttcttaatctccttgatagagggaatctcgaaattcaagtactcagcgtcgatcttctccgcctcaaacttctggttgaaatacgttttagaaaacgaatgtccgaggggatatcccagtaagccatatttctgcataacctttttattgtttattctttagatcctgtatataatgaacagatcccgaaggtaaaggtccgtacacgggcctgcttgaagccttggcgggtgagtaaatccgtcatgacctttccctgaggaactaccttgatggaagccggcaaataattatacgcgactttttctttagagagtagacgtccgataaaggggatgacggtctttgaatagatctggtagagttgtctcatgggaaaatgttccggtgtggaaagttccaagatcatgatatgtccaccgggtttcagcacccggtacatctctgagataccttgctctatgttctcaaaattacgaaccccgaaagcggcggttacggcatcgaacgagttttcctcgtaggtcaaggccgtacagtcctgttgctcgaaggatatatgctccgaataaccggcggcagctacttttttccgtcccacttccatcatgcctaacgagatgtcggcaccgacgatatggtcgggtcgcagctttttgtacatggagatagccaagtctccggtaccggtagcgatatccagtatcgttttaggagagaaaggacgcaggaaagcgatccctttcctgcgccatatcttgtcgataccaaatgagagagtatggttgagttgatcatacgtttcggctatcgagtcgaacatacgtttgacttgcgtgcccttttgttcctctttgttataaggaagtattgtctctgaaccatactgtgtcatgtgcggtatcttatttattctgtaaatattcagtaacgtttttctcgatgcggttcagcaagttatcagtctcgccttttacgaaagtctcccctgtgatatgctcgaacaattcgatatatcggttgctgattccttctacgatctccggtgtcatttcaggaactttctgtccggatttaccttggaagccattttccatcaaccattcgcggacgaactccttggaaagttgcttctgcggttcccctttggcgaaacgatcctcgtatccttctgagtagaaataacgggaggaatccggagtatggatctcgtcgatcaaatagatcttgccgtcacgatgaccgaactcatatttcgtgtcaaccaagatcaagccacgttccttagcgatctcggtaccgcgtttaaacaaggccatcgtatatttctcaagaacctcgtagtcctctttagagaccaaacctttagcgagaatctcctctttagagatatcttgatcatgctctccgatctcagcctttgtggtcggggtgatgatgggttcggggaaacgttggttctcacgcataccctccggtagtttcacgccgcagatctcacgtacaccgctcttataagcacgccatgcgcttccgcacagataaccgcgtacgatcatctcaaccgggaaaccttggcattgaacgccaaccgttaccatcgggtccggagtagccattttccagttcggacaaatatcagtcgtagcgtcaaggaacttggcggcgatctggtttaacatttgtcccttgtaaggaataccttccggcaagataacatcgaaagcggaaatacggtctgtagcgaccattaccaatacctcgtcattgatgttgtacacgtcgcgtactttcccatggtatacgctcttttgtcgcgggaaattgaagtctgttttaactaatgccttcttcatgactcttacttttagttgttgtctatattcgttttcttctcttttgcctctttgatctctttcttccgtttatcatcgaacttatcataagcctctacgattcgttggacaagtttatgccggacaatatctttcttggtgaactcgatcttaccgatcccgtttacgcccttcaatatttgcatggcctgtatcaatccggacgtggtagaaggcggaaggtctatctgcgtgacatctccggtgacgatcatcttggcgttcatacccaagcgggtcaagaacatcttgatttgatgcgtcgtcgtgttttgcgcctcgtccaatataatgacggcgtcgttcaaggtacgaccgcgcataaacgctagcggggcgatctgtatcacgttattctccatatattccttcagcttggctgccggtatcatatcctgcaaggcatcgtaaagcggttgcagatagggatctagcttatctttcatctcacccggcaagaaacccagtttttctccggcttccacggcgggacggcttaagatgatcttccgtacttccttattctttaatgcttttacggctaaggcgatagcgacgaatgttttacccgaaccggcgggtcctgtggcgaaaaccagatcgttgttctcgaaagcctttaccaataactgttgattctcggtacgtgcggtaatcggcttgccattcatgccgtggatgatcaggttctcctgcttcacgaccgtgggacctttcccttttataatatccagaatcacgtcttcggagagcgagttaaactcctcacagtatttttccacctcacggattttcttgagaaaaagctcggactcatcctcatctccaatcactttcatcacatttccacgggcaacgatacgcaatttcggaaacaatgtcttgatcaattgcatattagagttattcacaccgtagaaaattaccgggtctacgctttcaagaatataaattctttcaatcatccgctattccttttattaaattacgcttcaaaaagatgtgctattttttattattcgaatcaagttacaaaattagtaatattctttatccattgatgcaaagggagaagttttatttcacgggaacacatctttcagccgtccgtctaccatttagagaaaaactaattggagttaagggggaatttcggatttttccgtatgtttgtcaggcaaaacgaaggaaatgaagatgaagactgtgtttaatgtgatgttgttgctggtcgtgatcgtgtcggcgacggctttttcttcttgtaaggagaaaagaggtgaattgaagaagatttggtacaatggaagctataatcgtgattttaatgatttgaatgacgttcatttgtccgttgcgaagaagatcggcatagagcctgtctcttcgagggaaggagcggagcacgcctcccgggatatggtggagatcaagacgaatgactattacgaggtagaggagttgacgcactctattccgtatttggtgccggaagccgctaatctgctggaggatatcgggaaaaacttccaagactcattgaaaaacttgaatgcttccatttataaaataaaggtaaccagtgtaacccgtacggttgccgatgtcaagaaattgagaaaaaggaatacgaactcttctctcaactctgcccaccaatacggaactacgttcgatgtatcatgggtacgctatactaagatagatgagaaagataccttaaatattgataaggaccgcttgaaaatggtgcttgcctccgtgcttcgtgatttgcgtagggcggatcgttgctatatcaagcacgaacgcaagcaagggtgtttccacattacggctcgtgagttgtaatttgttccagcgctttcgtataaaccgatttgtcgtatccggagaaacagcacatcgtgacttgctggatttccggattctcttttaggaaggtatcgatcgtgcggatcgctatctgtgccgcctcctcgataggatagccatatacgccggtgcttattgatgggaaagcgattgttctcagtctgttctctttcgccaatcgcaaggagtttcgataacaattttccagtagctccggctctccgtgttgtccgtttcggtagatgggaccgacggtgtgtatgacatgacgggctttcaatcgataacctttcgttatcttcgcctctccggtcgggcatccttgtaaagtccggcattcgtcaaggagttccggaccggcggcccaatggatggcaccgtctacgccgccacctcccaataagctattgtttgcggcatttacgatggcgtctacatccaatgtcgtaatatctgcttgtatagcaattattcgttcgttcatatctttagttatttgtatgttggtcctgttcatatatattctaaatgtgtgcaatatagcgaaaaagttgctttgtttcaaacttaaaatagttgttttgaaagcatgtacgtgttttctaggagggttagtgggggattttggctgtattttgcagagtcaaatttttattggaatattttataatattatttggtttataaaataaacttgtctatatttgcgatgtgcaaagagtgatgcgcagctcctttgcatttttttatctatggaaggtttataaaataaacttgtttgtagtaacagtgataataataaagaggaggatactaaaatgagacgagttttattcatattatctttattcatgttggtatgtggttgcatagaggcacgtactattattgtagagattggaaatatacgtggtaaccatgggaatatcctagttatggctcagtcaggaaaagataccaagcctgtttatggcatggcgaagtctgagaaaggaaaggttacgatccgactggaaaacgtggattgggaaaagtttgatctgtccgtattccatgacgagaacgagaattggcaaatggatatgctggaaggaaaagggcctgcggaaggatatgcgttgaaaagttgcgaggtgaaggataaggaagcgactttcaaattaaaactgtattatccggtaaatcaatagagccatggtacggtttttactgctatcgctttggattttggcgataggcgggggtagtgctcaaaagatctcgggacaaacggtttataaagcccatgtttccgatgcggagggaaatgccgtggaatatgcgaccgctgtgcttttatcgggagaaaaacaggtagggggtgccgtggccaatagtgatggcgattttagcatggaggcggaggctgggaagtataggcttgttgttcaatgtctcggatacgagcctttacggaaagagctgatcttaccgataaaacggcgggattccttgattctagatctatcgaaccgtgttctgagggaagtcgttgttcgagcgaagaatatagagcggaaggcggaccgctttatcatgtcggtcatgccatctgccggaaaggatggtacggaattattatcgcaggcaccgggtgtgtggctctcggatggaacgatctcgattaatggggcgcaaggggcgaaggtgtttgtggatgaccgtgagattcgtttaacgggagaggagctactggcttatttgcggtctttgaaatcggaggatataaaaaggattgaggtaataccgatcgcgggagttgagtatgaggcctcaactaagggtggagtgatcaagatctcattgcggcaacgtccggataacggtatgcaaggatatgtatctttaggtacgtcattgtctccatctttacaagggtatattccatcggcgtccgtaaatgcacgtgtcgggaaatggagcttgaatggagcggtatcgggtacttttactccccgggataaaggagagatgaactccaacagggaatacggaacggtggggaataagtttgtgtctcaatctttgtatgatacggattccaaatatgggaatggacgtgtcggggctattttcgagatcgattcgctgaatagtgtcggagctgagatcgaatatatcaatcaagcttcggacggaacatcttggagtcaaacggatttagtaaagaactcttatcctatgaagagtacggggaattatcgacagaaggatgattataacacgttttccgctacggtcaattacttacgtaaaatggatgaacaaggctcgatatttaaggtcatagccgatttcgtaaataagcgatcaaccggggataatctccatacgatccgttatgaacaatctaattggagccgtgatacggtttaccggagtcatgcggcggcggattatgatatggcgacaaccgatatttctttccaaaagaatttgcgtgaaaaaatgtctttgaaaatcggggctaaatatacctatacgttgatggatgatcattccttgtacgagggtttaaactctagtgggagttggattcctaatgaggaatatggatataccttgagatataatgaaaacattgtaggagcttacgcctctttctctacggagatcaagaactggtcgttcgttgcgggggtacgtgcggaatattccaagacgtcggatagaagtgaggattttagtcgggattatctggatctttttccgaacttgaacgtgacctatgcgttcgatcccatcaagaggtggatgctggtagggcaatatgctcgtaatatcgaacgtcctccgttctataccttgaatccgaatcgtatacagagttcggactatagttatcagatcgggaatccttatctgcgtcctacttatatcaatcgtttcagtgtaacgttggtttataattatcgttatacggtgactgtaggaggaaacttgcaccacgacttgatccgggagttctgtaaacaagatgtggcgaatcccgatgtatcctatatcacgtatgaaaatcacgatcgggaaaaccattggtttgtagcggtcagcttgccgtatcaaccctttacttggtgtaacttgacagggaatttcataggcgtacggcaggatatccggatgacggaattgtcttctttctcgtctcattatttagggtttgccaatgcgatcgctacctttacgctgccggcaggttttacggtggaggcccggtatagtggaacgagccggctatattccggtaatagcgaggtcgccccccggcatacggttggagtaatggcgagaaagaaattcttgaatgataagctattgttggcagtttcagtcgataatatctttaaccaagccaatgagtacgccagtacgttggatgtttatcgaacatcatcccgttatgaaaacggatttacaggaagggtctttaaggttgcgttgacatggaatttcaatagcggaaagaaagtaaggaagagtaagattgagatcggttccgaacggagtcgcctgaatgaaaaataataaccgaaaggttgctcagaaataccaatggccttatctttggatacgtatttacattttcacattggatgaagaacaagataaaataaatacagttatggaagatagaaaattatcagaaaaagaaagtctggatattatcactcagatgatcaactccagcaagcgaaatatgaaagtagggagtggcaatgtgttgctttattgggggtattttaccgtgctcttatcggtcgtgatatcctctttgatagtgtatacgcaaaattatatttggtcttggggatggatgctcatgtttgctgtcggaccggttatttcatataagcaaagaggttgcgagccggccgtggtgacttatacggataagacgatctccagtgtatggcaagtgtttggctgtatgtttggacttacgttcgtcttgatcgcggcgttttgcgtgctttatgaacaatccgtcaattttatattaatgcttcctttatcgttattatattgtgggttgggggtgtcgataaatggcattatcttgcgggagaaatggatgatttactctccggtagttgctttcgtcttagttatctacatgctgatgagtttgataaatcatggtcctgtcacggtcttgtggtatttgtattttggcctttcatttgtggtaatgatgattattcccgggcatattcttaataataaagctaaaaaacaatgtttaaagaattagatcctttattgcattcccaactccggctagcggtgatgtccattttactatcggtggaggaggcggagtttgtctatatcaaggagaagacgaacgctacggcgggaaatctcagcgtccagttggacaaacttaatgaagctggttatatcgagatcgagaaggggtttgccgggaagaagccccgaacggtttgccggatcacagacaaaggacgcttggcgatggaggagtatgtgaatacattaagacaatatattaatatttagcttgtgccattcttagggcacgcttatgccaccgtgatggcacagctatgccataaggatggcacaagtgtgccacgcctatggaaagtagtggcacagtaatggtttgtcaatcagttgtatgctttggggcgaattgtttatccttccactatcttatatcccgaaacggtgagtaattgccggatctcattaatttgctgttgatttcttgtttccatctccaaccgcagataacagccattgatatcagccgtatggctgacacgctcgtggtatacggatactacgttggcaccggtagaggcgatgatttcggatacatgctgtaattgtccgggtttgtctaccaattcgatcgtcatggaacaagagcggccagatttttgcaaaccacgtccgattacccgggaaaggatattcacgtcgatatttccgccggaaatcaaacagattacttttttccctttgatgggtactttattaaacatggcggcggccacggctacggcacccgccccttcggcgattaatttatgttgctcgatcaacgcgaggatagcggtggaaatctcatcgtctgtcacggatacgatctcgtccacatattgctggcaaagatcgaaagtatgtattcccggttcttttacggcgataccgtcggctatggtacggacaccttcgaggcgttcgattttcccatgctcgatagagtttaacatgctgggcgctcctttggcttgcactccgtaaactctgatatccgggttcaagttcttgatggcataggcgactccggagatcagcccaccccctccgatcggaatgattacagcctctacttccgggagttgttccaataactccaaaccgatggtcccttgtccggcgatcacatcctcatcatcaaacggatggataaatgtgtatcctttctcatccttcaattgtaaagccttgttataggcgtcatcgtaaacaccttcgacaaggcatacatctgccccataagatttagtagcctcgactttagagataggagcgttatcgggcaagcagattaaggacttgataccatgagcggtagccgctaatgccacaccttgggcatggtttcccgccgagcaagccactacgccatgcgatttctcttcttccgtaagctgggcgatcttgaaacaagcgccgcgcactttaaacgatccggttacttgtaagttctctggttttagaaaaatatgggattccggattgatattgggagcgctgattaaatcagtgcgtctgatgactgtcttcaaggcatatgatgcctgataaattttatcgagtgtgagcattctgtctgtatgttaaaacgatgtcgcgaaagtataaaaaataccgcaacctattcatacttatctttgttatattataaatcaaaatatagagaagtatggtagtgatcgatttaacgaaagatggttttatcgccaatgtcggtgattttgaggcaaatcccaaagattggaaatatataggaagtcgtccttgcctcatagattttcacgctccttggtgcggttattgcaaacgcttaagcccgatattggatgagtttgccaaagaatttgatgggaagatttatatttataaggtggatgtggatcaagaggaggcactcgagacagcctttaatatccgaacgattcccactttgatgttttgcccgctagacggcccccgtgagatgatgatcggcacgatgggaaaactggagttaaagcagttgattcaggaaaaattgttgaagtaatataatatggatatatggtgtggggtgtagagacgtagcgtgtatgctgcgtctctattttttgctttcttattatatgaattgaatgaatagtaaccccaatcctacagaaactccggtcgctatcaatcccggcatcatgaaagaatggttcaagatgtatttaccgatgcgggtcgtgcccgtgcgatcgaagttgatggcggctacgactgtcgggtagtttgggatgaagaaataaccgtttacggcggggaataaagcgatcaacatatagggtgagattcccaatgcgatccctagcggcaataacgcacgaatggtagccgcttggctaaataataaaatggacattacgaaaagggccaacccgaataaccaaggcatctgtgtaactatatgctcgatagatccctttaattcagtcatattgccggcgataaatgtatctcccatccaagcgataccgaagatcgctaccaccgcttgcatacctgcggaaaaaacggaaccctgtgcggccttgataccatctgtttttgtaaataataagatgaaagcggaggctgtcaacattaatacctcaataatatgtgacatctgcatcgagaccttttccgtgccgacggtaaagaccggacgtagggactccatagaaccaaaaataacgatcgctatcgtagcgagaacaaatatagagaccgataaggccgctttcatttggttttcaacgcctttcgcctcataatgttccgtgctaaactcatggttcgccacccgctttaagtattccggatcttgatctagctctttaccgacctttaaagagtagatcgctcccactaacacacctaataaggtacaaggaacagagatcatcaagatattcatcaaggagatattgtatccggacaacatacttaataaagctaccgtagccgccgatatcggactagcggtaatagcttgctgagaagcgatcacggcgatcgccatcggacgttcgggacggatcttcgtttccgtagcaacctcggcgattaccggaaggaccgaataagccacatgccccgttccggctatgaaggtaaacaaataggtgacgagcgggcttaatatcgtgattcgttgaggattcttgcgaagcaatttttccgcccacttaaccataagatcaagtccgccagcggcttgcatacaactagccgccgctattacggcaacgatcataagcatgacatcgataggaggggaagtgggctggagcccgaatccaaaggtgagtataccgagtccgagacctcctaacacgcctaatccgataccaccgatacgggcacctataataatggctattaaaacgaaagctaattgtaacaacatgctgtgcaattcttttgatttagtttgtattggagacaaaaatacttatttttgctccgctatgaataacaaaaacacaaaaaacgaatgaaaagaacaagtttcgctattttgatcggtttgttttgccttttccctgcgcttttttctcaagtacgcagtgagttcctgttggaaaagaattggaagttcacccgggaagacagcccggagtttatcaatcctacttttaacgatagcaaatggcaatccgtgaccgttccgcatgattgggcgatttacggccctttcagctctcagaatgataagcaagaggtcgctatcgcccaagacggacaaacggaggccatggaacatgccggccgaaccggaggtttgcctttcgtgggagtcggctggtaccggaccgagtttgaggttcctcaatttacggatgggaagcgtgccacgatcctgttcgacggtgcgatgagccatgctaaggtctacgtgaacggacaagaggttggatattggccgtatggctataattctttctatttcgatatcacgaaacaactcatgccggggaaaaagaacaccttggcggttcgcctcgagaacttgccggaatcctcccgttggtatccgggagcgggattataccggaatgtacatgtaatcgtgacggaaaatgcgcatatcccggtttggggaacctacgttacgaccccgaccgctactaaggaattcgctaaagtcaatgtacggacacaaatcgtattgctggaaggtgccgatgccggcaagtatagcgtgaaaaccagtgtatggaacccgaacgggcagaagctgacggagcagactatacctctctcacagattaagtacaatgataatagtctctctcaagagtttatcatccagaccccgactttatggtcgccggatatgcccgccctgtattctgcggagactcgtttatatgagggcgatcaactgaaagatatatatacgaccccgttcggtatccgttcaatcgagatcattccgaataaaggctttttcttgaatggtgagaagacggtattcaaaggcgtttgtaatcatcatgacttaggcccgttaggggctgccgtcaatgatgccgctatccgtcgtcagatccggatcttgaaggacatgggatgcaacgctatccgtacttcccataatatgccggctcccgagttggtaagggcttgcgatgagatgggtatgatgttgatggttgagagcttcgacgagtggaacaaggcgaaatgcgcgaacggctataatttgattttcgacgaatgggtggagaaagacctcgtgaatctggtacatcattaccggaataacccgagcgtcgtgatgtggtgcgtcggtaacgaggtgcctaaccaatgggatgagagcggttgtaagatctccaagttcttgcaggatatctgccatcgggaagacccgactcgtccggtgacgcaaggtatggatgccccggatgccgtcgtgaataataatatggcggcggtgatggatgtggcgggattcaattatcgtccgttccgttatcaagtgaattataagaaactgcctcagcaaataatcttgggaagcgagacggcctccacggttagctcacgaggggtttataaattccctgtagagcgtaaggcgatggctgtctatgaggatcaccaaagttcctcgtacgacgtggagcattgcaactggtctaatctgccggaagacgattttatccagcatgaggaccttccgtattgtatcggggaattcgtatggacaggttttgattatctgggcgagcctactccttattatacgaattggccaagccatagctccttgttcggtattatcgatttggcgggtatccccaaggatcgttactatctataccgtagtcattggaacaaaagcgccaagaccttgcatatcctgccgcattggacatggccgggacgtgagggcgaggtgacacccgtattcgtttataccaattatccttccgccgaattgtttatcaacggaaagagccaagggaaacgtacgaaagatctaagcatcggtatcgatagtagttataccgaagcggctcaaaagagtttcgagcgccagaaacgatatcgtttgatgtggatggataccaaatacgagccgggaactttgaaagtggtcgcttatgataaggagggtaacgctgtggccgaggaggaggttcataccgcagggaagccgcatcatattgagttatccgccgatcgtaaccaattgacggctgacggaaaagacctttctttcatcaatgttagagtcgtagacaagaacggtaacctttgtccggatgatacccgccagatccagtttaaggtacgtggtgccggagcctaccgtgcggcggcaaatggaaatagcgccagtctggaactcttccatcttccggaaatgaaactgtttagcgggcaacttaccgctatcgtgcggacggccgaggaaccggggacgatctatttcgaggcttccgcaccgggagtaaaaggggcgaccttggaattgatcagtaaataagcttgattatcatataacgcaaaccgcgcgattcaagtccggagacggctgtgaatcgtgcggcttttttatacgatattcccgaatacatcaaaggtaatcgtcttgtcctgcccgttatgtgaaaccttgaataggtagaaggtgccattggcattcaataacgtatatatggactgtaccttgtcgctagcgtaagcggaggattcgaatccttgcatcacgatctgcggaacctcttgctcggacatggcccatgtggtactttgccacctgtaatccttattcaattgcgccactttataaatctggttatcgatcatatccagctcgtaacctaggctgttctgttggatatccagcaactcggcgttggcgaaagtgatctccatcaggttgctgacctctttcgggataacgatcggtgcgtcattattgatctcatcgtccacggctttgatcaggtttccatactgtgaataatacaggtctacttcgctattggactgctccgcctcgatcttgtaaacgattcccatatttaggcgattgatggcgtacgtgtcatccacggtccaatttgagtaaaagctttgtttgaaggcggtggataccgctgccggtaattgggcgaaagagatgtctatcttctccatcatccatatgccttgatccgtgaaccaagctgttgtctcggagccgccgttgttgaaatctaccacataatagttaccttcgatctcaaaaacagggtttttggcatcgggatatttctcttggaaagcgttctctaccggtggaagagggataatgccttgatgatcatcatcatttttgctacagccagagaaaaagagagtcagaccggctatacaggtgaatagaattagttttgtgttcatacattttgcgtttataagttttgggcatagaacaacaggtctatcggaaaagttttgagcgaaatcgatttaagtatattgaatcaagaacaaggatcttgtttcgacgagatccttgttcttgtataattgctacggatttatgttcaaataataggttgctgtgcctattaaagaacttccattatacattgcgcaggtgatgcgaagagatccaccgtaatgttgggagtttagatagacactaacatctaatcgattaccggaaggataagtgtaccatctatcgcattctccatagaattcagcgttccagctatacgaggtcggagttcctgtctttgtgtaagcatataaagtcgtcgtggcattaccccctggcgcattgatagaggaactgccgctactataatcctcttgactcttccctatataaacagtcggcatatcattttttttcatatattttaagcttgatgcatcaaagggacatgagctttgggatgcctcataagagcgtattccccccatttggagatgaatatattgggcgtagatgtcgttacggcagagtgattatcactaagataggatactttggttgcggcacctgttgttgatatataactaccatctaaccaatatacgtttgtgggattaatagtccatcccatccaaactgctgatccgccttcagtcatataccaagcataggcatgacaattgtaagtggttgttgaactacttattagagttgcttgtgaataggttgttgtacaatattggtcatggctcgctttttgtgaggctgataattcctcacttctgtagtaagtgtcattaacgagtgtcccgttaggagtgtaaacagtagcggctgctccttgagcttttgtctcaacattgagattcggctcccaaatcatgtttaaattctccatagtgatccattcattggggaatttttcgattcgttctccggaaagcaagaatagtaattgcccgcaagaagcacaagaattcaccccatccaaaacgagaatgtgttcttttccatctccttgaatagtaaagacccaagggtatggatagtctgttcccttgacatgggagtgagcgacagaatctactacattcaccaaccatttaggatatgttatctttccgtctttaatgacaatttctgaactggatgtcaagatttctttatcacctccttgcatattatccatttcattgtcacatgcgttcagcgtgaatgccagcatgattattaaatagtataatacttttttcatgatctcaatttattaaaggttacaatgtattgttttaataactcttcgattacattactgcccgttagcttttcatcgatggtgaattgtttaaatttgggcgtaatggtcttgttgtctatccgttctagacttcgacctaggagatagactacggtttttagaccatattgtccataaatatccgggttgttttgtttgtaaaggagtctctttacggcttcggaggagatctcttgctgtaaaagattatttgtattagataatatcgtctcattagacagaagagcctcgattaccatttgccgactaatttcattacctatttctatggaagtcaacactcctgctttcagtaattcttgttttttcatcttctcaaatagcaaagaagcattgtctttccttttgaataactcttgtaacccgttaaaacgtgcggaaaccttgctaatgccttcctgtattccattgtaagcgaatatgtcgcctaataatgggtaagcaaggcaaagttctataagctcttctgttgataccgtttttaatatctctgccggaatttggcaggctttcagcatatcctcatgtgtggataatgcttgccaagcctccgttcctggttttatggggtaatcccaactttttattgattgtgcgttcatatctatcgatataaacacgaggaggaaaatgctccaaacgaaagttactgtttttttcatctctctttagaatttagggtaaataatataagattggtattccttgattatggatttttccaaaaatagtcctttttgtaaagataatcaagtatttatatgttaattatgattgaatatctgtagattctcattgctgatgtctttgttttcgtacaaaagcggacacagtgttcgatatcggacatctcttttgttttatttcttcaataaatcaatcacttacgtttttggcacggggtttgctctttggagggtggaaaataaaaacaaacgaaatatggacagagagatatcaaaagaggttcggcagaaggagcagcgtaaacagtttataaagctgggggcggggatcggtattgccgttgtcttgattggcggggtgatcggttttatgcaaaccagcctgcaacggaaggacttggttttttcaacggtagataaaggagtgatcgaggtttccgttagcgcatccggcaaggtggtacctgctttcgaggaaatcatcaactcaccgatcaactcccgtatcgtcgagatttataaaaagggaggcgattccgtggatgtaggtactccgatcttgaaactggacttgctaagcgccgagacggattataagaaacaattggacgaggagcaaatgaaacgcctccaattggatcaactccgtatccaaaaccgcaataagctttccgagatggagatgcaattgaaagtctctcgcatggaactgaaccgaaaggaagtggagttgcgcaacgagcgttatctggatagcctaggcgccggaacgaccgataaggtccgtcaagtggaactggactataacgttagcgtcttgaaactgaaagaggatgagcaaaaatatgagaacgagaaatccttgacggatgccgattataaagtgaaagaactcgacctgaacatcttccgaaagagtctagccgagacgaagcgtaccttggaagacgcccagatacgctctccccgcaaggcgatcctgacctacgtgaacaacgaggtaggtgcccaagtctctcaaggcagtcgtgtcgctatcgtctccgacttgtcccatttcaagatagagggggagatcgccgatacctatggcgaccggatcgccgccggtagcaaggccgtcgtaaagatcggcaacgataaactggatggggtggttagcgatgttacccccttatcgaagaacggcgtgatctccttcacggtacagttggaggaggataaccatcgccgcttgcgctccggtttgaagaccgatgtatacgtgatgaatgcgatcaaggacgatgtgctgcgtatttccaacgcctcgttctacgtcgggaaaggagagtatgagttgtttgttgtcaacggagaccaattgatcaagcggaaggtacagctgggagacagcaactttgagtatgtagaagtagtaggtggcttggaaccgggtgacgaggtggtcgtttccgatatgacaagtttcaaggaaaagaataaactgaaattgaaataacgattcgaattatgtataagcagtacatcaaacaagcggttcaaatgctgcgtgaaaatacgctcgtaagcataatctctatttcgggaacggcccttgcgatcgccatggtgttggtgatggtattggtgttccagattaaatccacgggatatgcccctgagtccaatcggtctaggtttatgtatgtctggggtacggaagtcggttcgaaatcccccggaggatcggatcgtaatcgtggaggcatgtccagcgaggtcgtgaaggaatgtttctataccttgcggaaaccagaggccgtatccggctattgtagtgatagccattccttgtcattgcccaatagacggctcttcaaggagtatgagatttgttatacggacgcgggccattggaaaatattcgaccatcctttcgtggaaggaggcccctttagcgaggctgattttcaatccggtataccgaagatggtgctgtcggaacaggtggcgaccgatttgttcggaacaggacaggccgtcgggcggcaggttgtgatggattttatcactttcaccgtctgcggggtggtgcgtgacgtaccttcttcattgatgagctcctacgctcaggtatggataccctatagcagcaatgaggccctgacccgtgtaaatggggagtatggggagaatatggccggttatttcagcgtggccttattggctcgttcctcttccgacttcgatgccatacgctcggagctagaccaacaggtccgtcgctacaatgacagcaagaccgattataacgtaggtttcccttccgggctactttcccagttggatacggccatgggaagcggcgcttttcaaaaggtggactggcctaccttcttggccggatcgggcgctttcctattcttcttgctcttggtaccggcgctgaacttaacgggcgtgatccaatcgtccgtgcagaagcggaaagaagagatcggtttgcgtaaggctttcggggctacgggacagaatcttttgatgcagatcttatcggagaactttgtgctgaccttgatcggcggcgtgatcggcatcggcctctcgatggtcttgctggtggtagggaagcctttcatgttgagcgagaacgtgagccttacggcgcctatgctcgttaaaccgggcttatttatctccgcccttatctttacgttcttgctgaatatattaagcgccgggataccggcatggcgtacgacaaggcaaccgatcgtagaagcgttaaaggggaacgagtgaatccaatgaatgatgaacaatgagttgtcaattgtcaactatcaactatcaaattatgattaagcatatatttaaaataatatgggcccagcgcaagagcaacggctggatactgggcgagttggttatcgtgatgtgcgccctttggtttatgatggataagttatgggtggacgtgcgctgctataacgccccgatgggatatgatatctcgaatacgtggcgtttcaagctttccacgctctcgtcgaacgccccgggttatgtgcccgactcactttacgactcgaacgcaacacaggatttgttgaagcttatggaacgtatccgccaagagcaggaggtcgaggaggtatgtgttacgtattggtccatgccttattcaaacggaagttcgtgggggacgctccttcccttgggcgctgatacctcgaaggcggtaggacagaactaccacaagctgaaagtatccccttcttatttcgatgtattccgtatgaaggataaggagggccgtgctattaccccgttggtggagaacgcttaccgtccgctcgtcataacggcggaggcggaagatttcttcttcggggggcagtccgccataggccggcagatctcggagaatgacgacctttccgagcctttcacgatcgccgccgtgcttcctaccttccgtagcaatgacttcgaccgcccggagaactgcgctttcacgatattgaaaggtgagtcattgcaggagttcgtgaagaatttcggcgtaaggagcgctgaactatcggtacgtacgaaacgcccgatgaccgaggatgagatgtacgctttcttggagaaaacagcggatcggatgacggtaaataacaccttcgtccacggtgtcaccctccttgccgaccagcgtgatgaccaactccggtttaccaagaacgagaacagcaagaaactctccatgatggccttcctgctcgtgaacgtattcttcggtatcgtaggcacgttctggttgcgtaccgagcggcggcgtagcgagatcggtctccgcatggcgatcggttccagccggggcaggctgggcgagtacatgtatctggaaggtctgggcctcttggcgatcactgtgccgatcctactggtcttcgtcttcaatatggcctttttggataagctggattcctaccgcgagcccctctccatcctccgctttctagtaaccctcagcgtctcctacctcctgatggccggcatgatctgcatgggaatctggttccctgtccgcaaggcggtaaagatggctccggcggaggcgttgcattacgaataaattgtctatctttgcgtctgtcaattcattaatgagaaaggagcaagcgtatgacagctatagaattaaaaatgtcgttactgcaagaggtgatgtccttggaggatgagaagttgatcaagaaggccctcaacagcgtccgccgtatgaagatggctgctttcggtaaggccaccccggtagagaagtcggcagacgattacgtggagcctaccaaggaggagatcttggcggggctaaggaacgccctgcaagacgtgaaggatttgcgtgagggcaaggatgtggggcataagtttagagacttgagtgagttgctcaatgaggtataggataaaaacccatcaagacttcgataaagagttcaaacgtctctgtaagaagtatagctcattgaaggctgatttatcggctttgggtaagtctttgagcgagaaccctgatcaagggacgagcttaggcaaaggcgttcgcaaggtacgcatggccatcgcctccaaaggaaaaggaaagagccatggggcgagagtgattacttacacggaggccattgtctgcgcagataatgagggtacggttattctcctcacgatctacgataaggccgaccgtgactccatttcggcagccgagatcgatgaactgctgagatccttacgttgggaattataaaatctgaaactgtccataatcgctgtccgataacgaatcaagtgttcgttatcggacagctttttttacggggtgatgttaggaatcaagtggttacgtttttggcacgttatttgcctccgtaggggcacaaagtcggatgataacaaacaatcgctgttttagtcgggtaatagataatttataatacaaaagtttatgataaagcaatacattaaacaagcgttgaggatgatcggggagaacaagctgttgagcgtgatctcgatactcggtaccgccttggccatttgcatgatcatggtgatcgtcatcctgtatgtcgtgaatacggcgagtttcaagccggaggtaaaccgtggccgcacctgctacataacgaccgtcatgagcaatggcaaggatgataaccggcgcatctcctactcgtcgttgggactgcccttggtgaaggaatgctgctatccgctgaaaggggcggaggccgttaccgccatcaacatggatcgctataggccgttgaccgcctcgtccatggacgggcttaagaatcggacgagttacatctcttatacggataccgccttctggaagatcttccagttcgatttccagcaaggaggccccttcagcccggcggctttcacgagcggtatccgcgacgccgtgatcagcgagagcgtggccttggcccttttcggcacggaccaagtcgtggggcgggagatgaagctcgatttcatcgtctacaatatctgcggggtcgtgaaggacgtatcccggttcgcctcgaaagcgtgggcggaggtctggatcccttacacggtgcgggacgacgggggataccaagagggcatcaacggctcgtatagctgttgcgtcctgctgagaccgggcgtcacgagagaggagttgaggaccgaggcgctgcggaaggtcgaggagttcaacgccaagacccgggatgtcaaggccgatatccttcaccagccctccacccagatcgaggaatggatcggcggcggtagcgagttcggggcgaacctcttctacctctacgttcgttacggtatcatccttttcatcctcctgctggttccggccttgaacctatcgggcatcaccctgtcgaggatgcgccgccggatggccgagcttggcgtacgccgggctttcggggccacgcaaggcaccatcctctggcaagtgctgtccgagaacatggtcttgaccctgctcggcggactgctgggattggcgatgtcgtacggcgccatgttgttgctgagggactggttgctggtcacctcgctggggaagacggggctttccaccgggatgtttaacggggcggtctttatcgccgccttcctgttctgcctcgtgctgaacctgttttccgccggcctcccggcttggcgaatgtcaagattgaatattacggactctataaatggttgacgctatgtataagatgattctaaaacaactctggaacgagcgcaaggggaacttgtttatctggttggaaatgctcgtggtctctatcttcctgtggtacgcggcggacgccttgttcgtgatgtacagactctactcgcagcccttgggctttaacatcgagcatacgtatcatgtgagtttcggcgtgatcccggaggaaagccccgattatgacacgacctccgtgcatagcgagcggggaggcggggattacctgaccttgatggaccgcatccgccggaacccctccgtggaatcaatctgtttcaccaccggcgtgcattttcattaccggggatcgaatcaatacgccacgttccggaaggactcgttgatccgtaatggcttcgtgcgcttcgtctcgcccacctatttcgaggtgttcggcgtgaagacggcagaaggcggttccccctcggagttggtggatgccctgcgcgacaaccaagtggtggtgacgggccgtgtagccgatgacttcttcggtaacccggcggcggccgtgcgccaagagatctatatcaccgaccaaggctctcgtgatagcgtggcctaccgtatcggtggtgtctgcgagaaacaacgttactgcgagttcaccggttatgattacgcctactataagctggtggacgagaacaaggtggccgaggagggcgattgggtcggagagggcctgaacaccttcatccgggtgaagcccggtgcggacggcgccgctttcgccaccaacttccggaaggagatggagcagcaattgtgcgtgggcaatatctatctgaaggatgttttcccgatgtcccattaccgggaccagttccttgagcgttggttggatcaagtccgcctttacgtggcgggcatcgccttcttcctgctgaatgtcctgctcggcgtggtgggaaccttctggtatcgtacgcaacaaaggagcgccgagatcggcctccgtatggcgatgggagccacccgcaagggcatattctggcaattggtgaaggagggcttggcgctactcaccatcgctttcatcccctctaccgtcatcttcgccaacctgctgcatatggaggtgacgcaaggctcggagataccgcccgacatggcctcacgcctgttgttcggtttcgtcttctcgtatgcggtgatggctgcgatgattgtcgtgggaatcagttttccgtcttaccgggccatgcggatgcatccggcggacgccttgcggcaggaatgatcagacacggacatctgtgttcgggaatgaaccgactgttcgataatggacagtgctttttcaggaagatgccatggaatcaatgagatacgtttctggcacgtaatttgcttttaggtggcaaagcctagcgatagcaagagtttaacaataacaagagtcaaacaataacaattaaaatattacagtcatgatcaaactaacgaatttacagaagatttaccgtacgaaagagatagagacagtcgcgttggaaaacgtgaacctagaggtgcagcaaggcgagttcctcagcattatggggccttccggatgcgggaagtccaccttattgaacatcatgggcctgctggaccttcctacctccggcacggtcgagatcaacggagtaaacacggtaggcatgagcgacaaggagttggccgctttccgtaacaagcagttgggtttcgtcttccagagcttccacttgatcaattccctgaacgtgctggacaacgtggagctgccacttctctaccgcaaggtatcctcctcggagcgccgcaagctggccgaggccgtgctagagaaggtcggcctgagccaccgtatgcgccattttccgacgcagctctccggcggtcaatgccagcgtgtggccatcgcccgtgcgatcgtaggtaaccccgacatcatcctcgccgatgagccgaccggtaacttggactccaagatgggtatcgaggtcatggacctgctccaccaactcaacaaggaggacggccgcaccatcgtaatggtaacccacaacgaggcgcaagccaagcaaaccagccgcaccgtgcgcttcttcgacggaaggcaagtgcagtaaggggcggatctaggacactactgctcgcatcactcatgatagctatcatgcgttaatcatgaaagctatcatgaatcgttcatgaaagttatcatgtgtcgctcatgaaagctgtcatgtgtgatacgagcagggaaggctcgggagctatctcactaggaaggtgagtgttccatagcggggttgcttgtatggacgcgagttgggtgtgtattgcgtcaccacctccgccacccactcgccgtcggtgaaagcgaagccgggcgtgaagcaaagtcgtttgccggtattgataaacacctcggagggcgggtagaagtgttcttccgagccgtcggggcggtgcaggtagagacccacgcggggatcgtcgcccatcagtttcagccggtcgccatagatggagatgaagtggtgctcacctgccggaagctggttgtaaggctcgtcgctgtcgggcgtgcgaggctggatgcggaggctgacgtaagcgggacggggctgggagttgtaatccagttggtaggtctcgttcacggcacgcaagtttgccacccgttgtttcagctccggcgcggggcgcaggcgtggggcgagcgtatggcggttggggtcgaacttctcgtacaggctctcgaaaggcccgttcacggtcagttccgtccgcccgaagccgaagtccacgttgtagccctcctcgatggcgtcgtagatctcccgcttgaggaggttgaaggtggtgatgagcgtctccttgcgatactcgctccgtttgtctacgacacgggcggcgatgtcatcgatgctgagcgtacgttgccatacgacgcttcccttgtagctcgcgttaccgggcaggtggctcttgctgacgcggaggctcagcttgcgaaacggcttgggcagctccgacttaggtaattctttatccatgatctcgtggtttaatgaatgattaagtggcaaagataagaaagataacgtgaatcgaatgagtatgtacaagatctacataaagcaagcatgggccttgatccggcaggagcgcttcttcagctcggtctacatcgtaggcacggggctggccatctctatggtaatggcgctggcggtggcctaccatatacgtacggcgaatatcgcccccgaggtgcatcgggaccggatgtgctacctctcgaacgtgacatacaagttgaatggcacgaagagcaattacaaggcggcttgcggccctcgcctcgtcaaggaggtgatcggtaatctccgcgtcccggaggacgtggcggtgaccaccaactccttcatgatgcctttctcttatggtgacgctttcatgcgactgcccggtggagacgagtctcccaaggtgaggttgaaaggctgcgacgacggcttctggcgtgtctaccgcttcgatttcgtggaggggcggcccttcaccgaggccgagttcctctccggcatgccccgtgcggtgctgtgccgctcgttggccggccggctgtttgggcacgaggcggcggcggggcagacgatcttgctgaacggcttggagtataccgtgagcggtgttgtggacgacgtctccggcataaccgccgatgtctacgccgaggcgtgggtcacttattcctccctctccgtcgccatggaccatgccttgggcgagcgtgacggggccgtcggcctgctggaggcaaatatcctgcttgccgacgcgtccgacctgccggctctctcggaggaactgcggcgggaggtgaggcgctataatagcgggctgtccgaagggcaggtggtatgcgaggagcccttgagctatgccgacaatctcctttccggattgttcggccccgagacctacatcgtgcttgggatggcgctcctccttttcttgttggtaccggcgctgaacctttccgggatgaacgcgtcgagaatacaagagcgtgtcggcgagctgggtatccgcaaggcgttcggggcgacgaaggctacgctgatggggcaggtcttcgtggagaatatggtgctgatgctgcccgggggcgtggcggggctgctcttctcctacgtgctggtgttcatcttccgtaacgccctcctcgtgcctgggttcaatcttctggggacgagcggggatgtcttcctctcgccggggatgctgctcaatatgtcggtcttcgcgtacgccttcggggtttgcgtcgcattgaacctgctttcctcgatgctgcccgcttggaggatcgtgagggggaatataacggatgcgttgaatggataaataggagatacggttatgataatacatatattgaaactgataaggtcccgcatggggggcagcggatggatactggccgagttgctggtggtgttcgtggtgatctggttcatgaccagctacttcttgatgatgggtaagtcgtggtatgagccggtgggctacgacctcgagggcgtctaccatgcggtattggccgtccgtccctccaacagtccctcgttcgttacctacgaggagggcggcgatgaggctgcgcgcgacgtggagcgtatcgtggaacgcctccgggggcatgccgacgtggaggccgtggcgctctccgtctcttccttgccctataccctttcttggtcgggaagccgggtgacgagggattccgtcagcgtaagcgtacggctgatgaccgtctcgccggactacttccgtgtgtttggcatccgtcccgcctcgggcgaaagcccggagaggctgggcgaggctctgtccgggacaagggaaggcagggatcgggtgatatcggcggagttggcgaggcggctatatggcacgaccgacgctatcggggccgatatctacctgcatggtgatacccttcccggacacgtggtggcggtgacagggccggtccgcaatgacgagttcgaccgccggaagcaatgtatcctcttctccttgctcgacctgcgggagcttaacgatcttacacaggtgcagataaccttccgccttcgcccttccgtggctacggccggttacgccgatcggttcctgaaagcgatgaagcgtcaattgatggtgggtaacttctgggtgtcggaggtgcgagcctaccccgacgtgcgatcctcttatctggagaactcgatcgagagtaacgcccagcggatcgtctccgctctgggcctgttcctgctcacgaacgtgttcctcgcggtgatcggcacgttctggtttcacgtgagccgccgccgtgcggagctgggcttgcgtatggcgatgggttccacgcgtgcctccatcttgggcttggtgatgggggagggcttgatgttgctgacgatcgccaccgtcccggccctgttgatttgcgtgaatctggcctggattgacttgatgccgcccggcttggtagaatccaaagtaggctgcttcctgatcaactccctgctgacttggctgatcttggcgctcatcatcagccttgccacttggtatccggcccgcaaagcctccagcttggaacccgccgatgccctgcgctatgacggataacagataacacccggttgtagagacggggcgtgccccgtctctcaccgactgatagaatatttaaatggaatgaatatgtataagatctacttaaaacaagcatgggccctgatccggcaagaacggctgttcagctcggtctatatcgtggggacgggattggcgatctcgctggtgatggtgctgtccatcgtgttttacgtgaaaatggcctctatttatccggagatggaccgggaccggttgctgatcgtgaagagcgccacgctgaagaatgagaaagggggcacgagcagtggcccggtttcgccccgattcgtggaagagtgcctcgcgggcgtatctggcttggaggcgttggcgctatgttgcgatgatgccacttccgctttcgtgcagccggtgggcagtcccgtgcaggtaccggtcatgaagatgggggtaaacgatgggttctggaaagtattctccttccgtttcctagagggcaagcctttcaccgaggccgatttccggtcgggcatgcccgtggcggtaatcgcccgctcactggccaagcggctttatggagacggcaacgccgtggggcagaccttgagcctcgacttcatgcccgtccgtgtggtgggtgtggtggatgatgtatcctatctgatgaatcgggtatattcgcagctatggcttccgtacaccctgatgcccgacctcgaggagcggtttcggtccgccgaggcgcgtatgcccggtctgggccccttgaaggtctatatgctcgtgaaggacaaggccgatatcggcaaggtgcgggaggcggtggcggataacgtgcgtcgcttcaaccaatcgttgaacgtggatggtaaacgtgagttctcccttcttgggcagccggatcgccattgggagagtatcttccggtattggtcgaacgtggagccggatatcgtgggagacttgagccgttatggggtgattttcctgctcctgctgctcgtccccgccgtcagcctctcgggcatggccgattcccgtatggagcggcgtctgggcgagctgggcgtgcggcgtgctttcggggctcccaagggggcgttgatcgggcaggtcttgatggagaacttcctgtatacgctgctgggcggcttggtgggactcctgttctccttcctgttggtgacgttcgccagttcgtgggtcttcaagatcggcaacggcttctcggatgccgccccggatggtgtggacgtatcgctctccatggggatgctgttcaacccgtgggtcttcttgatcgccttgtgcgtatgttccctgttaaacctgatgtcggcgttgtggcccgcttggcgtgcgtcaaggcgacctatcgttgattcgttgaacgcttaaatggagggaagaaagatatgtggaaaataacttggatacaattgatgaaccgctggcgtagcaacgtgtgggtgtgtgtggagttgctgctcgccttttgcctagcgtggtacatggtggattacttcttcgtggagatctataaccgtagcctcccctccggacgtggctacgcgaatgtctggcaggtagaaatgggcctcttgccggaaacctcccccgactatcgagccgccgagagcgactcgatcgccatgctgggaaattatgagcggataaaagaccgcttgcgtgattatccgggagtgcaggcgatgggcgcggcctcgggctgttactccacgccttatacgggctgttattacggtatcggtttggcgaacgcggccgatacgagtaagcgggaagcggtcatgaggtatgagatagatcctaccacggatttcctgtcggtcttcaaccattcgtacgccaaagacggccgtccggtatctacatccgattttgattggggagacccccgcgctatagtaaccacccggatggtggagcgaaaggtatttggagaggcatccgccgttgggcgtgaggtgaaagaccctttcgacgaggagggcccgacttatatcgtaaagggcgtattagaggatatcaagcgttttgacaatagcctaccccaaggtgccgccttcttggcgatccgtccctcggcggaggagatccccgagatgaattatttcatacggatcgatcctgccgtggcaggccctcgtttcgccgatacgttccgggagaagatgagccgtgagcttcgggtggggaacttctacctgaaacgcctgacctcctatgaacggatcaaggccgataccgattattcctttggcattacctacgattaccgggtccgtatggcgttgatggccttcttgggactgaatatcctgctttgcgtgatgggtacgttctggtaccgggtgcggatgcgccggggagagatcgggttgcgcatggcgatcggttcgccccgtgaagagatacgtagccagatggctcgtgagggcatatgcctgttactcatggctaccccgctcgctttgttgatagaggctcaattcgtgatggtcggcttcttggacatccccaaagggaccttgccggagcattactggccggcgatcctgccgctccgtttcttgctggtgaatatcttgacatggatactgctggctatcgtcatcctgcttgccgtctggctccccgccagcaaggccgccgagatggagccggccgaggcgctgcggtatgacggataacagataatacccggttgtagagacggggcgtgccccgtctcccaccgactgatagtataattaaattgaataaatatgtacaagatctatttgaaacaagcctgggccttattgaaagagaacaagctcctttccggagtctctatcttcggtacggccttggcgatttgcatgatcatggtgatcgtgatcgtatggcagatgcgtaccgccaattactcaccggaagacaatcgggaccggatgatgtacgtcagtgatacccgtgcctcctacaaagagaacgaatcttataacgactgctaccttctcgcttcccgggtggtgaaagattgtttctatcccttgcgctctgccgagaaggtaggcatggcgtatcatggcgtgcaacgcttggcggcagtggcggatcatacggtggagttcaagtgcgacgtgacctttacggacgcggcgttctggaatatcttcaactttcgtttcctctctggtaagccttatggcgaggaagaagtacaaagtggcatcatggatgctgtggtaagcgagtccgtggcacgtcggctctatggcacgaccgaggtcgtaggccgtaccgtcgagatcagctacgtgccctataccatccgtgccgtcgtgcgggatgtctccctgctggccgagtctgcctatggcgatgtctggttgccttataccaccgacaattccctgtatgataatggttccgaccgtctcgtcgggggcttccgttgttatatcctcgcaagttcgtccgccgactttgatgcgatccactccgaggctgaggcgaatatcgctcgccttaacgaatcacaaagcacgcacctactgaaaattggaggaggacctgatacccatttgggcgatttggctcgcgaggatgctttctctgagccgaatgtacgggaactggtcatgaaatatgttatcatcgttcttgtccttttgctgatccctgccatcaacatgagcggtatcacgcaaagccggatgcgtaaacgtatggcggagatcggggtgaggaaggcgttcggggcgacacgctcggaattactgacgcaggtactctacgagaatctgttgcagaccttgctgggaggtgtgttaggtctgtttttctcatacgcctccgtattgctcttgtccgattggttgctagatacgggcacggcatcgatgggtatcggtcgcaccttcgtcaatgcggagatgatgttcaatccattgatcttcctttacgcgttccttgcttgtcttgcgttgaacctgctgagcgccggcatcccggcttggcgagcctcaaggatgcgtatcatctcggctctcaacgagaatgttcattaatctcctgcgttggatgatagctatactaaaataatagaaagatatgatacaacatttattacaattgatctggaaccagcgcaagcaaaacgcttggttgtgggctgagttattgctggtctcggtcttcctttggttccttgtggactacctgtatgtgatggggcgcacgtatacggctcctctgggcttcgatatccggcatacgtacagcatcgtgatcagtagcctttcggaaagaagcccggattatatcccgaaggagaagcgggagcggccggatggtgttcatctgctgacggcgttggatcgcatccgcacctatcccggcgtggaatcggcctgccttacggatggggggatgccttattatatgggaagccgtaacctcgtttggcggattgatacattgcaggtgccctgccgctatgctttcgtcaccccggagttcttcgacgtgttccgtatctatgataaggacggcaagacggcttccttgaaacgggccatcgaggataacaactccatcgtaatctccgccgacgtggagacgatgaatcccggcctttccctactcgggcaaaaggcgtaccgggggaatgtgaccgacgagatcgaggagacgatccgtggtatcagcgtccccatccgccgtcatgagtacaccaaggcggaacccaacgtctatagggccctgcggctaagccggatggaggaaggatactatgaggggatgatagatgccgtgcgactctgcgtacgtgtccgtccggatgtcgataatgctgatttccccgcacgcttccgcaaggatatggccgaacagcttcggctaggcaacctctatctgctagacgtacagcccttgtcatatattcgcgacggttatatccgttcgatcggcgtagagaacgaggtgaaaacccgtgtggcggtagcctgcttcctattggcgaatatattcctcggcatcatcggtaccttctggttccgtacggaatatcgcaaaggcgagatggggcttaggatggccttaggctctacccgccgtcagttgaactcgatcatggtgggagagggtgtcctattgctggtcttggcgttcatcccgtccttactcatcagcttcaacatcgcccatatggatttgatagatacctatcagcttccgttcacgtggctgcgcttcgcgatttgcggagggattacgtttgtcttgatcgtcctcatgatcatctgtggcgtatggtatcccgcccgctcgacagctcgcttggagccggcggaggctctgcattacgagtgatcagggtagctagcttgctttcgggagtgtccgataacgagccagatgttcgttatcggacacttttttatgatatggctgttgatatacagctgcttacatctttggcacagcatttgctaatagatagataacagtcataaaaacgaacacatatgtataggcaatattttagacaagctctacagatgctgaaagaaagccctttcttcagcgtgattaccattctgggcacggccttggcgatctgcatgatcatggtgatggtcattgtcttcgagatacaaaataaaggcttcaagccggagttgaaccgggatcggacgctttatgtgaaggacgtggcgatcacgcataagaatgaggaggatggcggtatgaactattcccttgtcggtggccgtgtggctaaggagtgcttctttacgctgaaaaccccggaggccgtcagcatgcaattgatgcggatgcaaacgctggtcacttccacggatcaaacgagacggatgaaatgcgatcagatacggaccgacgagggcttctggaagatcttcgatttcgagttcttggcgggaaaaccattcctgcggagcgatgtggagagtaatatcaagaaagcggtgatcagtcgcaggttggcactccgtatattcgggttggcagacgagagcgtgatcgggcaaacgatattggtggcacgccgtccatatgtggttggcggtatcgtggaggacgtatctcctctcgccaaccgtgcgtatgcccagatctggattccttatgctcaatccgatgtggatcggctgataaacgaggagacattggagggtctgatcggtagttatcgggtcttgatattggctcgctcaagcggtgacttcaacaagatcaagaccgaggtggagcaaaacgtagcccggtttaataattccttgcaagaactcaagattgacttgatgaagcagccggatacgcagatggagagccgccttcgcttgtggagtaatgtcgtgcccgacgtgccgagaatgttggggcagtatgcgttggtcttgatcgtcttgcttctggtcccggctatgaaccttagcgggcttactgcgtcaaggatgcagaaacgcatgggggagctgggggtacggaaagcgttcggtgcgaaccgtggcacgttgatacggcaggtactggcggagaatctcgccgtgacgttattgggcggggtgttgggattgctgttctcctatgtggcggtcttcttgcttaaggattggctgctaggctcgttcgagctggcttccttgaatagcggcctgacgttgagcgcggggatgttgatccgtccggctatattcttctttgctttcctgttctgtttattgctgaatctgctgagtgcggcgattccggcgtggaatgcctctaatgggaatatagtggattcattgaatgataagtaataaccggttttgttaattctataattcgtcactgatatgataaagcatctagtaaagatcatctggaaccaacgtaggcgcaatgggtggattgccgccgagatcctgctggtattcgtggttctgtggtacataatcgattcgctaatggcggttgggaaagtcttcttcgccccgatgggatgggatatcgaccatgtctattggatctcgatgggtgtggaagaggtagaccggaacgagatggattctacctatcgatacatcacttccggacgcagcatgctgacggcgatcgaccgtatcaagacctgcccgggtgtggaggcggtgggtgcggggctgatgtccatgccgcatacgggagagaaccggtacatgcatgttgccgtgaacgattcgataaatgtagagtacgtgaagctactggaagtgacacccggttttctggaggtgtttaatttccgtcccatggagggcgagaagaaggattgggaagagatgctgaacgggcgtcaggtcgttctttccgccggcctgtttagggaatttcaggagaaaggcggcaaacgggatgaggggatttccttctggggggataggcgatcgatcggtggggttaccgccgatttccgtgccgaccgtttcacgaaaagctgtagctggctgttcatgcctttgacggatgaagagatcgccgaggacgataccgatttccatgtgaagatcgccatccgggtaaacccttctgcggatcatgatttcccggagttcttcgtgaagcaaatggagaagcaactctccatagatcgtttgtatttgctggatgtcatcccatactcggacttgagatatagcatggaattaaggaatggcgtaaaatccgagttgcagaaccagatcgccgtgatgggattcttgctgttcaatatattcttggggatcatcggcacgttctggttccgcacggaacaacggaaaggggagatggggttgcggatcgctttgggttccacccgtttcagcttaaaggggatcatgattgccgagggggtattattgttgacattgatcgctatcccggccttattgatctgttttaatcttcatgtgtcggaattgacgaaaggattctatatggattatacgatagcccgtttcgtggagggtttctttataacctacttggtcatggcggtgatgatcatcttggggatatggtatccggctcaccaaatggtccggttggagcctgcggatgccttacggtatgaatgacttttttgtttaacatattacacttacacacaattgaaagcccggtcttgtagtgatacatggccgggctgttttcgtgcttggcaaaaatctgcgagttaaaacgtcattgacgcatataccccataatgcccgtctcccgctaccgggctgatagacaggttatgtttcttcgcgaacgggcgggtaaagatataggcgctaccggcaccgataacggctcccgccgccacgtcccaccaatcatgcttcttcccatagacccggctccaacccacgtaggtagacacggcataagccggaataccccatttccatccataacgcctttggataaaagcggctcccgcaaaggatacggaggtatgcatggatgggaacgaatgattatcgctgaagtcgggccgctctttcttcactaggtatttcagcgcataggttacgcccaatgtcgtaaccccggtgaatacgccttgtttcagcccttgccaatcttgggttgccaatacggtcgctagactcgccaccggagtgataaacaccaatacgtctcccgaggtccgtacggctttccggctaccggtcaccttcaattcttgtccgttaacggacaggcatagcatgagcattgtaattgcgaaaaggatatgtctcatagatttaaaatatagttgctattttaggtataaaaatgataaacccgacgatcgctgccgctatcgccatcaataatacagctcccgccgccaagtctttcgttcgcttgatagcctcattatactcaggggagaccaaatctgctagggcctcgatggatgaattgaccgcttcggcagctaataccgctccgatcacgatcgttactgcgatccattccatgcgggaaagtccgaataccaccccggcgataagtacacaaactgccgcgaaacaatggatccaagcgttatgctccttcgtgatcaatagcttgattccgttgaaagcgaatttaaagcttctggctctctttcgaaatgtgaaaccgtcattcttcatttttatagcatctcttattgaggagggcaaatataggtattttttgcctttatcgcatatcctgacgaacaaacaggatattcacctttcatattccgcaattcgtcaagattacttgttggtttttatttggaacgataacttcgttgattaaaaaagtgcctgtgatatgagcatagatcaaagtaaaagaataaatttatggcttgaaatcagatatgaagataaaatataactttctaagtccgttgctaatggcgatattgacgatctgttgcctgtggattgttacggatgtcgcttatggtgtccgtatgtgggagctgggagtggacgcatggatcgggcgtatcaaggcccttgctattatattgatcggcgttagcttatcttatttgttttttaattacttggctaatatttttttagataggagtaaagagcggaggtcccgcccggtattccgggaatatctatgggtggtcttgtttaatttagtcgtgctcaatatcggcttatatatcgtgatctattctataaatggaacgacctatcggtggggagaggcgttaatgatcaatgcggtagctgtgccgatctttctcctatactatttcttgatccgtaataatatattagccaaacgctattcggagaaaatcgttcaattggagaaactgagagtagatcagctggaaacgcaattgaagctgctgaagatgcaataccatccccatttcctgtttaatgccttgaatacgatctatttcttgatcgatgaggaaaatgaggaagcgattgaggctgtagagttactttcggacttactccgttatcaattatatgatataaatacgaaagtgacgatcgaagaggagattgattatttgcgaacatatattcaattccagcgacttcgtatgacgaaacgcttacagttcgaggagtcctttgacccggaattgaccggacaaaaaatacatccgttgcttttccttccattattggagaatgcgtttaaatatgtgggcgaagcgtattggatacaagtatctatgcgggaagagggttcaaaggtatgctttggggtaagcaatactttcaatccggactccttggaacaaagaaaggggaaaggcattgggatcgacaatctgagaaaacggttggagctattgtacccggataaacatgagttacgtataaaaaaagacaatacccgttttagggttgagttatgtattgatttatcagaataatatggaaataaagtgtatcataacggatgatgagccaatcgccagaaaaggacttcggcgacacatcggtaaaattgattttctgaccatcgtcggagaatgtgaggacgctatacaactcaataatatgctgaattcagttcaggcggatttgctttttctggatatagagatgccggatatgtctggactggacttcttggagagtgctcagaacacaccgaaggtaattatcacctcggcatacgagcggtatgcgttgaaaggatatgagtttgacgtggtggactatttattgaaaccgatctctttttcccgtttcctgaaatcggtcaataaagcacatgcgttgatggaatctacatcgaaaagcgaggagcctgcttatatctttgtcaagacggagaagcaacttaaaaggctttatttaaaggagattcaatttatagagggcatggagaactatattgttatccataccctcacttccaaagagatcgttcatctccggttgaagagtatattggaaacgttgccggcacaaatttttatgcaagtgcaccgctctttcatcgtaaatctttcttatgtacaagcgatagaaggaaatctattaatcattggggagcataaaataccggtgtcgcgccctttacgggaagaggtctataaatcgatcgtcaataatcaactcattcaaagataagtatccaaaaacgaacacactgttcattatcgaacactttaaatattcctatttatcggattatcaatagtatatgtttttggcatgccttttgccttaggcaggataaaaaaacttatactaagatgagaaggatctatatagcgatgtgttgtctgtgggcggggatttcgggagtatgtgcccaagacaatacgaataaagttcgaataaccctgcggcaagcgatccagatcgcacagcttcaatccgtagacgctgccgtggcgctcaatgagttgcgaacggcctattgggaattccgtacgcatcgggcggatcagttgccggaagtgatatttacggggactctgccttcatatagcaagcaatactcgaagtaccagcaatcggatggttcttatacctatgtgcaaaacaatgccttaggcttaaatggagagatctctatcgcccagaacatagccttgaccggaggtaagatcgccttgaatacctccttggattttacccgtcagctaggtagtggcgcttacaacgagtttatgagcgtacctgttagtttgacattgacgcaaccgatcttcggcgtgaatgaccaaaaatggaaacgtcgtatcgagcctgttcgttaccaagaggctaaggccgcttatatggagaacgtggagaatgtaacgatcgctaccatcacgaattacttcaacttactgttggcggaagataatctggatatctgtaatcagaacttgctgaacgccaataaactctatgacatagcggtagcgaagcgtaagatcgggcatatctcggagagcgagttgatgcgtttgaaacagtcggctttgcaagcgaaaggtaagctaaccgaggcccaatccaattataacgcgatgatgttcaagctccgttcctttttagggatgagcgagcaagacgtgatcgagcctgttcttcccgaggcgatagaaggggtccgtatggattatcaggcggtattggagaaggctcaagaaaataactcattctcaaagaatatcatgcgccgccagttggaagcggattatgatgtggcgaccgccaagggaaaccgtcgaagtattaacctgtttgcctccgtgggttataccggtaaggatatgtccatgcgaggagcttacaacccgttgaaagataaccagatcgtagaggtcgggctttcgattcctatcttggactggggaaaacggaagggaaaggtaaaagtagccgaatcgaatcgggatgtcgtactttccaagatccgtcaggagcaaatggattttaatcaagatatcttcctcttggtggagaatttcaataatcaagccgctcaattggagatagccgccgaggtggacacgttggcggaaaagcgctacaagacctcgatcgagactttcatgatcggaaagatcgatatcctagacttgaatgacgcccagagttcgaaggatgacgcgaagcaaaagcatatccaagaactgtattattactggcgttatttttataacatccgtagtataacattgtatgatttcttgaataatcgtacattagatgccgatttcgaggaaatcgtgaaacgataaattgattatatgatactgataatagatgatgacgcggctgttcgttcctcgcttacgttcctgctaaaacgtgcgggtttccggccggaggcggttccggggccgaaggaggccttagaggtggtccgtgccacggcgccggagctgatcttgatggatatgaacttcacgctgactaccacgggcgaggaggggattcaattattgagacaggtgaagatctttcgtcctgatgtacccgtgatcttgatgaccgcttggggatcgatctctttggccgtgcagggaatgcaagccggagccttcgattttatcacgaagccttggaataacttggtattattaaaatcgatccggaccgccttggaactgagcgagcagaagaaggaggcaaacgctcccttgaaccgttcggatgccgatcataaatttcattttgataagatcgtggggcaaagtgccgctttgatggatgtcttggggacggtctcgcgtatcgctccgacaaacgcctctgttttgattaccggcgagagcggtacgggtaaagagctgatagcggaagcgatccatgcgaatagcccccggtcgaaagaggctttcgtaaaggtaaacttaggcggactttcccaaagtctttttgagagcgagatgttcggacataagaagggggcttttacggatgcgtacatggatcgggtagggcgtttcgagatggcgaacaaaggcacgatcttcttggatgagatcggcgatttggaactgtcttgccaagtaaagctgcttcgggtattgcaagaccagacctttgaggtcttgggggatagccgcccccggaaggtggatatacgggtcgtaagcgctacaaaccgggatttacgatcgatggtggcggaccgtacgttccgtgaggatcttttttaccggatcaatttgatcacggtgcatttacccgccttacgtgagcgaagggaggatatcccattgctggcccggtatttcgcggataagcaatcggagatcaatgggctaccgagggtggagttctcatcggatgcccagacctatttaagccgtctcccttttcccggtaatatccgtgagttgaagaacttggtggagcggacgatccttgtgtcgggtaagacgcttttggataccgctgatttcgaggttcattgcatgaatacatccggtgctaaatcgacgattccgccttctttggagggcttgaccttggatgagttggagaagcaaaccatcttacgctccttggaagcgcatggaggtaatttatcgcatgtcgctacggcgttgggaatcagtcgtgccgccttgtaccggagattagagaaatacggaatcccgatcgataaataagaagaggcaaggatgaggctgaaaggactattctggatattgacgacgctgctgttgactatattggcggtggtgacttattatgtcttttatacgtcttctatccggatgtttttcgcggtagaagccttggtcttgcttacgatcatctatttatttgtcttttatcgccgtatcataaagcccttgcatatcatcggtaacggtatggagctgttgaaagagcaagactttagttcccgcttgggaaaggtcgggcaaacggaggcggaccgggtggtcgatgtgtttaataagatgatggagcagttgaagaatgagcgtttgcacctccgggagcaaaaccatttcttggacttgctggtcaacgcctctccgatgggagtgatcatcttgaacttggatgaggagattctatccatgaacccggccgcatgtaaattgtttggcgcgcaaagctcggaggatatggtgggaaaacgttttcttcaactagattctcccttggcggaagaattggtacgggttccgatgtatcaagcgcaaaccgtccggttgaacgacgctaatatttataaatgtacgcattcctcatttgtggatcgaggctttcaccacccgttttatttgatagagacgttgacccaagaggtgttcaaggccgagaagaaagcgtatgagaaagtgatacgtatgatctctcatgaggtgaataatacgaccgcgggtatcacctctaccttggatacgttggagtctactttcagcgggatggaagatatggaggatgtctgcgaggttttgcgggtctccatagaacgctgctatagcatgagccatttcatcaccaatttcgccgatgtggtgcgtatacccgaaccccaaagtcgtccgcaagaattgaaccaagtggtgtccgcttgtaaacgctttatggagacagtttgccagaaccggaatatcgagattgtcatggatctgagcgaggaatctccagtcgtgaatttggataattcattattcgagcaagtcttggtcaatattatcaagaatgccgccgaatccatcgagcgagatggaaagatttatatccggacgactgtgcgtcccacctgcttggagatagccgatacgggcaagggcatcgacaaggaaacggaaactaaactattcagtccgttcttctctacgaaaccgaacggacaaggtatcggcttgatctttatccgtgaggtgctgttaaaacatgattgccgattctctctccgctcttacgcggatggattgacaaggtttaagatttggtttagttgaaataatccctttatggtttgaggtttttcccttgtaggctaaggctgtatccttacaggtgttagcctttttgtctgcttgtattcatcatgcaacagccgttgcatgatcatctaccaactgttgcacgatcttctaccagtcgttgcatgatcgtccaacagttgatagatgatggatgtctctagaggaaaagtctaaagataaggatggaaaggactaaaggatacggaggttttgggcaagctgtactggattttatactatctttgggccgtataaatgcaatagaaatctaatcttgaatatcatgaagaaagtagtatctgtattatttatccttgcgattatcgtattttctgtattaatggtaagctattcgagtgatcaaaagccggagaaagttcttcgccatgttgttatgttcggttttaagccggatgtgtccgaggcgcaggtgaaagaggttgaggatgccttttgtaagttgccttctcaaatcgacttgatcaaaggatatgagtggggaacggattgtagtccggagggattgcaacagggcttgactcattgctttttcttgacttttcattcggatgcggatcgggacgcctatttggtacatccggcgcataaagcatttggcaaggtgttaggagggaaggcatcggcggttacggtgttggattattggacgaaataaaaagaatgggcgggatgaatcgatgagtcaccccgcccgtttttatattccttagttactttatattataaccattgattcatgaactgatccatctcttccgcatgggcttctaggctttgaagtagcttgaattgggctttcgtacggattaagttatgtttcgggctatggatcttgtaataggtatcgccgttgatataatcggttaagaaacgaacggtctgcatataagtcaataagcgtccaccgtaaggtagcaatttgatctcggtaggagttaagaacgccttggctttttccatatatccacgggtataggctttgaatatctccatattaacgtttacgttatccagattctcatcgtcctcggcacccgtattggctccggtacggataaagtcgccgatatcggaaaggacgaagcccggcatcacggtgtccaagtcgatcacgcaaagcaccttgtcgctatcagcgtcaaacatcatattgttaacttttgtatcgcaatggttcgtgcgtttcttcaattggccctcacggtacaggcgttcttgaatgcacatcgcttcggcacgtttctcgatctcctctaccaaatctttcacctcttccaaccggcctgccggattagcggctatagcctcatggaattgtcgcaagcggaactccatattatggaaatccgggatggtctcgcccagcgtaccctcgggtatatcggacaacatggtctggaaatcaccgaacgctttgccagcctcataagaaagctcaggagttacttcctcataacttttgctgcgagggatgaataggcatacccgccaataactatctccatcgaaataatattttttcccgtctttagtcggcaagaaggttaataccttgcggtcgatatccgtttcacctttttcctccagctttttgcggatatgagtggtaaccacatggatgttattttgcagcatatccacgttggtgaagatcaaatggttgatacgctgtagcacgtatttgatctcccctttctcgttggtcactttcaatgtatcattaatgtgtccgtttccgaatggttcagcggaaactactttctcgtccaactggaactgatccaagatgtttagtaattgttctttcgtttttgccatgatatttcattatgttaactcccgcgaagatacaaaaaaaggccacgatacaaatcgtgacctttttttatttcttaaagaaagaaatcttatttcttgttacggttaccataacggctcatgaacttatcaacacgtccggctgtatcgaccaacttagacttacctgtgtagaacgggtgagaagtgttagagatctcgacctttaccaacggataagttacgccgtcgatctcgatcgtctctttagcgttaatagtagaacgagtgatgaatacatcatcgtttgacatgtccttaaatactacaggacgataattttcaggatgaataccttttttcattgctttattatctattttaatttatactctgtatatatttggtaaccggtattttggcttgcaaaggtaagggtttgccacaaacaaacaaagaaaatcgtattatttttttcaagggcgttgattttgtgttattttatatgctttgaagcatcatttgtcgtgaatcttgattatctttgtgcaagtttttaatcattaacgtaataacataataacaactatggtaaattacaaagatttgggcttggtgaacacaaaagaaatgttcgctaaggctatcaagggcggatatgctatccctgctttcaacttcaataacatggaacagatgcaggctatcatcaaggctgctgtagagacaaaatctccggttattttgcaagtttcaaagggcgctcgccagtacgcaaacgctactttgcttcgttacatggcacagggtgctgttgaatatgctaaggaattaggttgcccgaatcctcagatcgttcttcacttagaccatggtgatacgtttgagacttgcaagagctgtatcgactctggcttctcatctgtaatgatcgacggttctcaccttccttatgaagagaacatcgctttgactaagaaagttgttgagtacgctcatcaattcgatgtaactgtagaaggcgagcttggtgtattggcaggtgttgaggatgaggtttcttcagaccaccacacttataccaatcctgaggaagttatcgacttcgctactcgtacgggctgcgattctttggctatctcaatcggtacttctcacggtgcttataagttcactccggagcaatgtacgatcgaccctgttacaggtaagatggttcctcctccattggcattcgatgttttggacgctgttatggagaaacttccgggattccctatcgttcttcacggttcttcttctgttcctcaggaagaggttgagactatcaacaaattcggtggcgctttgaaggctgctatcggtattcctgaagagtggttgcgtaaggctgctaaatcttctgtatgtaagatcaatatcgactcagactctcgtttggcgatgactgccgctatccgcaagactttcgctgagaaaccggctgaattcgatcctcgtaaatatctgggcccggctcgtgataacatggagaaactttacaaacacaagatcatcaacgttcttggttctaacgacaagttataatcggaagtttcttgatataaataaagaaagccatctcggtatcgggatggcttttcttttggtctgtagtttagtcttttaataccttacgaagcgcttccaacatcggatctacggtaagatcgttgccggtagcttgcttgatccacacattcggggtgaggcggccttgcttgaatatccggctaacctcattcgcgaaatccttgccattgaggtagttctctagctggaactcgataatctgtccgaaagcgtaggcggaaaggtagagcggataaccgatcatatgggagtaaatcgctagaacggtctcgtcttttacaccgaataccggagcgtaatacttattccagatttccttggaaagacggatcacggcctcctgtaattccccggcagtagcgttaggatgtgcgtacatccatttccatacggagatatccagcatggaaacaccgcaaatctcatacatgctccatatcttatccaagatatccatcttttctttttccggattctcgtcttttatgcccagtaactcaaggtctcttttctggaagacaaaggccagcgcttcggtgaaagccgtattgggaactccgttgagcatataataatcgacatcatataatgagatcgtttgctctacgttatgtccgaactcgtggatggcgatattatatcctttgtaatccatcccttgtgaagggatacgggtacgtaaacgggaacgctggcctttcatggaggctccccacgcatgaccggaaccacgggcgggatcgactgcgatcttatccgccagatattgggcacgatcggggctgaatcctagtttctgtaagatttccggtagcttcttttccatcgttaccgcatcgggatacagggtacgggtttgctcgtttagcttgttctcgtccagattgctacgggccttgaagccatcgtaccatatatcgtaggcttccagtttgcgtccgaggcgtttggagatgattttccccacttcctttagttcgggggcggaaaggaactgatcgaacagggcttctacatcgttgacatctatttccatatcttccgtgaacttacggtctatataagtgtttcccgtatatttgtctatacgctgcatggcgttgaaattattcaacattttctgatagcgggccgggctttcaggggtaccttctagttcatttccagcttgggataacgtattggcgtacgggttccattcgtaacgatccgagttgatcacctctttcgggatttcttgcgagatgattcgcttcatgacctcatataccatccgttgtttttccaatccctcttttcctttgttataattggccttgatctcgtcgcgaaggttccaatggcaaagtaagcgcatgtcggaggggaaaatggtttttcctttaggagttagtaaatgccccatatagatattataatctgcgatgtaaatatctgcgtcactttccgtatcggcggcggcttgctttacttccgccggtatccgttccgtaaacatatcgcccagacgggcgtaggcccatgctttacggtcatcacctaacgcctctttctccttgagagtaagttggggaaagttgagggcgatgatgaagccgatcttgttggcgtatagatcgtccattaggtgggaactggggctgtaggacccgaatttctcatcgatggcgtgtagaggtccggtatctaggttcaaatttcgttgcagacagagtaccatctcgttgaaattgccattgataccttcaatatactcgctgatcttgaggaaaacttggtctttttcggcgggatcggatagataattctcccggcagaaggtttgaaacgcttgctcatccccatcggaggtttgccagaggcgggctacttgctcgacaccctttgtgattcctgcttgattcttagcgtccttggctattagctcgtcaatcgtagcttttacgatagaaggctggatgctggcttgcccttgcataaagctaaaggcgcaggccagtaacatacaaatacgtacgacttgctttctcatggtatgtttgtataaagttatttaaaacaaatgtatgaataatattcgtatctttggccgatttttctaattgagtaaaaaacaaagagatgaaaaagttactatgtatgtggatggtcgtatgcggccttttgttgattcccggaaacatgaagggacagtccttgaaagatatcttaaattcatctgccgtaaagaacgccgtgacttctgtcaccggagggaaagccgtgactttcgagaatttacagggaacttggatgtatgtgaaccctgccctgcaactggaaggtgataatgccttgaagaatgtagcgggaagcttggcggctaccgaggcagagaagaaaatgaaggaatattgcgcgaaagtaggtatcgtggaaggtgtatttaattatgtctttaattcggatagtacgtttacgagcgcattgaaaaggggaagcctgaaaggtacttactcggtgagtccggaagataaaacggtgacgttacggtatacggtgggtaataagaagctgaccgtttctacgcttaccgcccatgtcgtcctttctggtaatgagttgacattgctttttaacgcggataaattactgaagttcttgagcacggtttcttctatatccagcaatacgaccttgaaagctatcaataagttggcaagtgaatatgatggcatgatgctgggtttcgatttgaagaaataatgtaatatgatacgatttataccgaggcgttattgggcagtaatagcggttgcgttggcattgaccatgtccgtgttggacggcacgattgtcaacgtggcgcttcctaccttgtcccgtgaattcgggacatccccttcctccacgatctggattgtcaacgcttatcagctaacgattacgatgtctcttttatcgttctccgctttgggagatatttatggatataagcggattttcttgatcgggacgacaatattctgctcaacgtcattattttgtgccttatcctcgtctttcgccatgttgacggtcgcgagaatattgcaagggatcggagcctcggctatcatgagcgtgacgaccgctttacttcgtattatttatcctccacaatatatagggcggggaatgagtatcaatgccatggtcgtggcggtatcgattgctgccgggccgtcgttggcgggcgctatcttatcagtcgcttcttggaattggttgttcgctatcaacgtacctttagggatttgcgcgattataacgggttattttcttttgcctcaaaatccttgcaaggatgggccgaaacgaaagtttgataagatcggtggaatctcgaatgccctgactttcggattgctgatttattcgttggaaggcatcgcccatcatgagaactggagaatgatcgctttacaggttcttcttctattggtgatcggaacattttttatccgcaggcaactacggcaggaggttccgatattgccattggacttgatgcggattccgatattcgccttgtccgtattatcctcgatcacttcatttacggcacagttgttggcgatggtatcattacccttttatttgcaaaatgtggccggaagaaatgaggtggagacggggctgctgttgactccttggccggtagcgacgatcttgaccgctccggtagccgggaggctgatcgagaaatatcatcccggattgttaggcggtatcggaatggtggtgtatgcgaccggacttcttctattggctttattgccggggcaacccaccaatatggatatcgcttggcgattgatgctttgcggtatgggtttcggcctgttccagaccccgaataatagcacgatgatatcggccgcccctcgttcccggagtggcggggcgaacggtatgcaaggtacggcacgactgttggggcaaacgctggggacgacatttgtcgctttgatctttagtgttacctctgccaccgatagtatgccggtttgtatgtatgtagcgatcggtttcgctttagtcgccgctatcgtgagttgtctccgtatctcacagcccgttcccatgcgtggaaggtgagtaggaagatacgatttctaatagggtctcaccgtagttctctatgatctttttgccgattccgggtatcttcaacagttctttcgagttcgtgggcaaagtgttgcaaacgccaattaaggctttctgttgcaagatcgtgtaaggaggcaactccttttctacggcaagctcgtatctccattgtttcaaacgggcatatagctcaggatgtaagacatccgtggagacggggatcttttccgcttccgtcgatttccgcgtcgatttctgcttgctggcaacagccgactcctcaatgttcgctttagccttggcggatagatagtcgatgagacgaaaaccatcttggcaggcttttaatgtagcgaccttgatcgtaagctcatcgctgaaagcttttaatgcggatgtaaatgccttacgggcctctttattgtcgatctctacatcggaagcctctatcaaagggaggcaataggtctcgatcttttccagaaagtaagcgcaaccttttcggatgcggtcttgtatatgctcgtccgtatcatagagattcgtgctggagatcatacgggtgagttgctggcagaaacgttcgcctacttctactatatccgaacggaaataatcccgtacccggggatattggttgcttaattccgggtatagtttttgcagatgggtgtatgccgcgtaagatgtatattgcaacttttgttgtacgggattgaagtcgaatagctcggttgccaatctcaaataatactgttgttgggcttgacgcagttggtcttcacacggttgacgctccgagagggaagaggtataacttaatatcttctcatcgctaatcatggcgtttcgagtgatcgggctacttaataccattccttccaatgtcttgcaacggctcaaggcaacgtagacttgtccgtgtgagaaggcggcggatgcgtcgatgatggcatgctcgaaagtcaagccttggcttttatggatcgtgatcgcccaagcggttttcagtgggtattggctgaaagagccggcgattgtctccgtgatatccttcgtgttctcgtcgatcgtatatttcacgtttgtccatgtctcccggtctacggtgatatcgtttcctaattcgtcggatacgataatcttgctcgggctgatgaagacaattcggccgatctttccgttataatatcgcctttcgccggaagagtcgttttttacgaacatgacttgagcgtcttgctttagctccaatacctcgtcggtcgggtaggagtaagctggaaagtcatccttgatctccgccttgtacgtataagccgggccgggtaattcttgcaacttccggttattgatttgctgggcttgataattatgggttgtcagcgtgatataacctgctttgtcatttggtttaaaattggggatataacgttggtttaaggtgtgtagcgtattctcgtcgaagcggttttcccggatattgttcaataagcgtacgaacgtatcgtccgcttggcgatatacttgagttaattcgatgcaaagataatcactttcggaaagagccttactgtcaaaaaagaagggagaggcgtaatgttctctcaacaaattccattcgtcctccttcgctacgggggctaattgttgtaaatctccgatcaataataattgaacgcccccaaagggtttattcctatcccgataacgacgtagcatatcactgatagcatccagcaaatcggcacgtaccatactgacctcatcaatcacgagcaggtccatactacggatgatattgatcttatcccggctgaatttatgagaataggatttattttgcccggaggccatttcgctacccggtatatacggtccgaaaggtagctgaaagaaggagtgaatggttacccctcccgcattaatcgccgccactccggtaggtgctaccacaatcatccgttttggggaagtctctttaagttttttcaagaatgtggtctttcctgttcccgcttttccggtaaggaagatgttggttccggtattttccagatagttgaaggcaaggtccaattgtaaattcgtctgcatcatatttaagctgtttaggtgaattcacaaatgtacgtataatctttcaaacgtccttctcaaatggaaaataaacggagtaactgcgctaaaatctacatccctttttcctttttaggaagagattgatatacgatatcgtaggattgttttataagctctttgatcttgttgtcgggtacatcttgattaaaatagacactaatccagtattttttattcatatgccaaccgggtgttatgccagagtatcgagcttgcaactctcccgattcattcgggtcacatttgatacagcaaaaatcaaatacttcgatatttacgaagcagaaccatttacttcctacataaaagcaaagaacgtcccgactgtatttatcaggaacattcgtgaaaggcattttttcataaacaccattcaacgaaaggcaatattccctaaactcttcaatattcataacattcgtatgtatgatagattatagcgatatcctatagactaagaaactcaatggttggacggagacttcagtagcgggagcctctagttccaccgctgattcaatgggtatgactgtttccggtttacccaatgtgttcttcgcttctaagtctgaggcatgtaagaccatcaactttcctttatgcttgccggatgagattccgtttaggtttaattggatctttttgctctggatgccggtattgacgattttgatgatgagctcgtttgtgcctttgtcgagggcggctgtggcgaatagctcgctttgcccggtaacggcttctttgttcatcgtcaggggcaatacgtttgttccggcattgtgcccgtataattgttgtacatagtagttaggagttttcacgatgtttaggttgttgaaccagattaagtccggacgccattgccacgcatcgacatgtgcgaataaaggggcgtatgtacataattccaccacgtcggcattccgttcaagaccggtcataaacgcagcctcgcataatgcggtcaggaagctattctcccggttagtcgggtggcaagcatattcaccggcgaacactttggggccttgccgatcatacgaatcatatcgtttggcactatttaggaaccattccggtgagcgatagaaatgttcatccaccagatctacttttaagcgtttcatctccggccatagatattcgaaatcttttccttccgaatcaggaccggaactgccgatgattttgatctccggatatttggctcggatggctttcacgaatggttcgaggcgttcgggatataatggtccccattgctcgttgccgatagcgataaatttcagattaaaagaagccggatgccccatatccgcacgcactttgccccattgggaggtaatcgggccattggcgaattcgattaagtccaaggcatcgtctatataaggttgtaatttatctaccggcacatgctggtccataccctcattctcaaactggcatgacagcccgcaattcaatacaggcaggggctcggctccgatatcttcgcttaattggaaatactcaaagaatcccaaaccgtaagattgataataatccgggaatttcttgtgaggaaatgtataattccatcggctgatattgataggccggttctctacggggcctaccgtatttttccattggtagcgtgtggcgatggttgtaccctcaacgatacatccacccgggaaacgaaagattcccggctttagatctttcaacgcttgtgccagatcgcggcgtaggccgttcgtgcgattgttgaatgttttttccgggaaaagggagatatgttccatatccaaagtacctgccgtttccatcgtgatgcgtaggcgtgatttagcctcggtagctttgggagacaagataacggaatatttcttccagtcttttccttttatctctaggtgttgtgtctcataaatatcgttatccctgtttactaattcaatacgtagtttgatcgggttattggtctcggtacgggcatataaggaaaagtcgtaattttcgtcagcctttataccgatacctttgaagccttcgttctccagaccggttccggtgatttgcccggtataagtcaggtgtgcgtaatgggggtttttgttgaaacagggattcttctcagctatacttacatcgccgaaaggctcccaacctccccatggattctcaaactcgaaggagcggttcttgattagctccgcatacaatcctccatctgccccgaaattgatatcctcgaagaagattccatacatggttgactggataggcgagcctactttctgtatatcgatgtcaaactcatggacaggaacgatgtcttgtgcggtcatgcagtttacacctacacttaagaggaataaagccgcggtttttttcatgttctttcttctcatattctatgtttttcaataaataaagatttagacaatcaaattcgctatcatctgtataaacaagatcaggaataccatcgctatcggataaaccgtcgcataagccacgcttggggctgggctgtctgtcatagaatctgcggcggcaagtcccggggtactggtcataccaccggcgattgttccgactaaatcgagaatgttgatcttaaagaaataatatccagctaatacggctataatcatagggatcattgttatagcgataccgactccgaataaagttaaaccgcttgattggaaagtggaaaccagatttacaccggcggatgtcccgacctcggagaggaatagcaataatcccaattggcgaagcaggttattagcggaaccggacattgaccagatgatcggacctgtttttccgatggcgcttaataccaaggcaaccataaggataccgccggttagtcccggagagaatgagaaggaatccgagaaggatatatttaattttccaaacaatacgcctaatacgatacccatagcgatcgggaaaaagtctgtatccgaaagacgtttctcatcattgccaatgaattgggcgagttcatttacgctttctttctcgccggcgaccatcaacttatctccaaacttcaacaccaaattaggttccggggaaaggtcgattccgcttcgacgtacacgggttaccgtacaaccgaaagttccttgtaaatttaaatggcctagcgatttattgataatgctcttattggtcagtaacagggattgcaaggtctgtccgccacttaacggcagatctccctcgatacgttctcccaacaataatgtcagttgctccaaggctttgtcgttacctacggccttcagtaaatctccctcgttaagcgtggtatggggagttggcatagatatgacattgtcgtgttttatacgggagactaccgctccggtcatggcccgtacctgcaattgtgccaaactttttccgcagatgtttttattcgtgactttaaatgcggcggtatgtaatgtaggatattggcttttccgttgggcttccagcgctttagcctcggctatcaaatccttgcgaagcattttgggcaatagtttcacgaaaaggatcacgccgattacgccgaacggataagcgatgccataggcgatggatgctgcggatgattgcgtggagtcgatcgctaccgccaaaccgggcgtactcgtcaatgccccggcgatcagaccgacgatactcggggtatcgatatccaagatatacttgaataagattcctgtcaagcatgccgaaccgacaattaataacgtcaggataatgagtgtcttgcctttggaacggaaggagtcgaaaaatccggggcccgcttggataccaatggtaaagatgaataacaccaaccccatattccctaattccttgggtatgataaccccaaaatgaccgaataacagggcgatgaaaataactgccgatacatctagcgaaagacctttgatctgtatccggcctagcatgaatccaagcgctatgatcagaaacagggcaaaataagaagactgaagtaatgtttcaaacatgtcagatagttttgaagtgaagctgttaaagatgcaaaattaaactttttagcccattcgggcaacggcttggcaggatttctgtacctttgtgccatattttagaaaagagaaagtaaagagcataagcgtgagacgatattttatatatctgggatataacggaaagaattttcggggctggcagatccagccgaatggtatgacggtgcagcaatctatagaggaggccttggccatcttgatgcgtacgcccgtgcctattgtgggggccggccgtaccgatgccggcgtacatgcccacttgatgatcgcacattttgattgggaggaaccgatcggggatttggtattcctcgcggaaaaattgaataggctcctgcccaaagatatcgccgtttataagatcgtgccggtcgtaccggaggcgcatgcccgcttcgacgctacctcgcgaacctataaatattatgttacgacaaagaaagacccgtttaatcacgagctggtttataagcttcccggtcgtttggatttcgaggcgatgaacgaggcgtgtaaggtcttattcgattatatcgattttacgagtttcagtaagttgcatacggatgtaaagacgaataattgccatattcaacatgcgggttggacgcaagaaggggatatttgggtgtttacgatccgtgcagaccgtttccttcgtaatatggtgcgtgcgatcgttggtactttattggaagtcggaagaggacgtttaacgatagacggcttccgaaacgtgattgaggcaaaggatcgttgcaaggccggaacctccgtgccgggacacgccctgttcttggtagacgtcacgtacccggaagaactctttccagtggaggattaaaccatgtggttagctctagccttcctctccgccttcttgttaggttgttacgaggtcaataagaaaatgtcgttaaatgggaatgccgttattcccgttttattcttcaatacgctcataagcagtttgattttcgtcccgttcatcttgctctctttttatacggattgcttggacgggacgatggtgtatgtaccccgtgcctctttggaggaccatctgaaggtattgataaaggcggtgatcgtcttatcctcttggatatcggggtattttgccttgaaacatttgccgctgacgataaccgggccgatcaaggccagccagcccgtgcttacattactgggtgcgatgcttctgttcggggaacggctgaatctatttcaatgggtcggagtcttgctttctatcgcttccttttatctcctttcctcatcggggaagaaagaggggattcattttgcccataataaatggatcttcttcacggtcctgtctatcttgaccggagcgatgagcggattgtatgataagcatttgatgcgtagtatggatgtaatgacggtacaagtctggtttaatgtctatcaatgtgttatcatgtcatttatcctgttgtttctatggtatccgaaccggaaaaagagcacgcctttccaatggcgatggaatatcatctttatctccgtattcttatgcgtggcggattgggtgtacttttatgccttgacattcccggattctatgatctcgatcgtatcgatggtacgtcggagtaacgtattggtgacattcttggcgggagccatcttcttccatgaaaaaaacttaaagaacaaggcgatcgacttattccttgtgttgttaggaatgatattcctatatttggggacaaaatagaaaattagataatgagacgagttatagttacgttgttgatctgtgtctttgcgttgggaatgaacgcacaagatatgacaagtgtgttcacggcaatgccagaccaatacattcctcaattggagcacgcttggcgaaaggatttggtggatctttatacttcaggaaaagaatcccggctgaaaaatacgatgaatggcttttctaccttgcaaaagctaacgaacgattaccttttgctacagactacggagcgtagcacggtagagatgaaattacttcccttggtaaacaatacctacgtggtttgtatgatctctacggtaaacggcccggttccggatagccgtatcgagtttttcacgaccaattgggagcctttggcaacatccgatttattcacgcagccaacttccgattggtatatcaagcagggaatagataagaaagacgaagcctatcaagaggccgcctcacatttggatatggatttaattcaatatcgattgagtccggatgatcagactttgactgccatttatacgactcctcaatatctgagccaagaggctcgtgagaaaatagagccgtatctcattgaaccgaaagtctatacgtggcagaaatatcattttcagtaattctttccttatccatccactccgatatagttcaagaggtttttttgcggtactactgcacggcggttgcggcaatactgcacgtgggttgcagtagtactgcgataaagagtctttttttaatgggtaggagagactaagatcccttcttcattaaaaagaattgttatatctcggtctccttgctccagctcgaactcataagagagtccttccgctttttgaatgacatggatatcatcgatttgataagaggcatatgcggaggccttgaatgcggtcatcacgatatcgggtacttgggaagagcgtatttcccactccgtatataaccatttgttctgggtatccagccaaacttccttatggatattctcatgaaggatatccacctcggtaccttttgtctccgtatctatctcaaggattttcgctcccggatacatctctgaaatgagttccttaatagcgctgggggtaacagagggacgatgctcgttgtcgccgttaccatcggttacttccttgatgagaataccaccttccgtataatgtaggtctgcatcttgctcgccattttcaacgtcgagaacgtaaatggtaccagcgtccggacgttctagcatatctacatcgtctatcttccatttagcgtataggcttgcctcgaaactgttttttacggtttggggcaaagcgttgtaaggaagatcggtctctgtcagcatccagttgccttgcggatcaaaccacgcttcagcctcatatgaaccggtgtaaaattctgctttgacatagcctgcctcgttctcccaactgacacgttgcgcatccggatattttgtgtcaaaggcttttgttacaatactctcaggtgtgaatttgtcatcatcgtcatcacatgacatgaatacgaatgagctgcaaaccaaagttgccattatgaatgcttttgttttcatacgattgattttaattaaaaatatattaatacttatcttagagtgtctattagtcatcgatatcaatcaagttcccttttaagtcgaatgtcatctcaagaccgttatctagctttatctcataatcccgtatctctttttctattttaacaaccttattcgatgaatagtttttcttgataaggtcttgtattacctccggaatgatcgctggcgggatagggagcccatgccgtttaatctctttccattctcctttatggttaaactcaacattggtcccgtccgtgaggatcacgtcgtaactgctaatccggatcagatttttctctatttggatatgcgatactgggatgtctttaaaatgatccgatatgaattggcggctggaaaccggcaatatgttggtgtcactcgtgatcttatcattgccggcacaagccatgacagataataatgataagactatcagtaaataattgatccttttcatatgccttgttttttattataccgcaaagaaaaggatgcattttggaaaaaattgggaatttcggccgttaatagaataataatgtgaatgtatgcatgccatttgcgtattggtaatctatccggatcgaatatagatcgactattgatttgacaatggccaacccaaggcccgtcgattcttgttgtttgctttggctggcaaaacgggcaaataataattccttatcaagggttttgtcgattcccgtatttgcgattgtaagcatacgacgagagatcgtgattcctatatcccctttctcgtaattatggacataggcgtttttaatgagattggtgattaacgtagtggccagcgattcattcatggtgcataccaaactctctttttctgaaactcgtaagtggagagcttttctttcgtatatgtcattaattccttctaatatcttatggataagatgatttaggcaaatatcccgggtctcggggaattgtttgttatctatccgagaaagtaataggagggatttattcaaccggatgatgccgttcaacgcttgatgcaagccagcgatctctttcagttgatcttctgtgcaatctggatgttcgcttaataattctaatttgttcatgcatacggccaatggagtttgtaactcgtgggcggcattctctacgaaatgtctttgtttgttgtatagcttgtcgctctggttgacgctttcttgaacggtctcgtttaatatcttaaattcctcgatgggtgtagggttgtttaatggaggattatatttgcctacttgaaaacttttcagccagcttaatagcttatataaaggcttaaagcttcttttgaatcctcgatggatcacgaataagatacaacttatcaatgcgatatataagacggccatgctccagataatcgtctcgatcatatcttcttgttctaaggtggataactccagcgtcagttcgtagaatttacgatcttttgtcatgaaataagtgcgtaaggcacgaaccggttcgtattcttgctctatctctatgtataccgtagtatcgtagaactcgtccttatctagtttcgcttcgctttccggaacctcacgaatgtagtaccgggtcatgatatccacatgatctttcagcaatgtgctgtccgctaaggcggagcggatgataatctctttgtagttctcaaggctgtcatttgtctcgtcttctacctcatgtagaatcataaggcagaaaacacatccccaagcggcgaaaatgaccaatatggggacaaataaattgcggagggtgtaatggattagcttcatatttattcctcgtcggtcattttgtaaccgaagccatagaccgcctttatttcggggatggctccggcggcttttaatttctttcgcaagttttttacttggctatagatgaagtcgaaattatcggcttggtctatataatctccccagacggactcggctaaagtagctttgctgatcaaacggttggggttggatatgaaatagtagagcagatcgaactccttacggttcaatacgatctctttcccgtttatatagacggaatgtttatcgggatatatcgttaggttcgctaaagacagttgcaattccccatcttgttgcttgcggcggataacgctcttgatgcgggcgttcaattccgccagatggaaaggcttggtcagataatcatcggccccaagatctaatcctgtaactttatcctcgatagagtcttttgcggagataatgatgatactgtctttcttgcgtaaggcccttaattccttcaaaagggtaaggccgctacctcccggaagcatgatgtccaatacgatacaatcgtaatcataatcatttattttaagagaagcttcccggaaagaggaagcgctctctaccacatatcgttctttttcaagagaacgaacgataacttctctcagtgcgttttcatcttcgactaccagaattttcataggctagcttgttaatcacacaaagctactgaaatattctgataaaaatctggaataagaaaagattcagtatcgttctacttcaataattgggcctctgagttaaacgtgagacgaacctcattgttctcatgctctagtttgaatacgtaaaatgttcccgaaggcttgtctatttgtgtcacctcatctatcttatattcatgataagccgaatttgttaggttatccatgatgtctacgggaacatcttcggcatggatatcgaatttcgtacttagccactcgttatttttgccgagcagaacctctttcttaacgcctttatccttgatgtcgacttctacacctgcggcatctttatcgtaatcggtaatggtcgcccccggatattttatctggatcaccttttgaatcgcttgagagaccgatttgtcatcgaaaccttgtttcttttgttggcaacctacggtgaggaataagcagcagctcatgaataaaatggctgtaaatgatacttttagtttcataacgtttaagttttctattacaaacaaacgggtgacaggcaaagttttttccaaataagttaattttccatgatatgtttttcttcctttgtcgtcttgattatagaaatggaacttgagacgtttaaaataaccgtactacctctccggcagaagatgttgaatttctcccggagactggttgaggacgcagccgatgctgaggatgtggtgcaagaggcattcataaagctttggtatatccgggaaaaactggatgcctaccatagcgtggaggcgctggctatgcaggttacgaaaaatctctcattggataagataaagttgcgaaagccgcagggatcggagttggagagcgttacattgatatcggaagcggtaagcccggacgaacaactggagcaaaaggatgccgccgagtgcatacggcgcttgatcgcccagttgcccactttgcagcaaaccattatccggatgaaggatatagaaggctatgagttagccgagatcgcggagatcacggctacaccggtcgagaatgtccgggtgaatctctcaagggctcggaaaaagatacgggaacagtttttacaattaaataaacaagagaaatggacatagacgagttattaaaccgatattttgaaggagaaacctcttcggaagaagagcgggaacttcgagccttctttacttccgggaatgttccggacaggttggcggtctatacgcctatgtttgcctatttggaggaagagagccggaaggaacgacagccggatgaggcattgattccgattgatgaggatatcctttttatgctggatgcggaaaaggtggaggaaaagaagacatttactttacgatccgtgttgtatttggtatccggtatcgccgccagtttcttgctgcttttggggcttaaccatctgttgaatccggtagatccttgtttctgctcggataattatgtcgttataaacggtcgttgttatacggatattcataaagttcgctccatggcgctggaagctttgcaggaggtggccacacctgcggatgagtactttccggaagcggatcgtgatgaggccgaccgtatgattattgataaccaattgaacgagcttcgttctttatttgatgataatgaataaaaatactgtaaatatgagacggttcaaatacatgttatggttgctggtggcggtattttgcttaatgccttgtggtgtctcggctgccgagacacagaaagacttgaagattcaggaagtctttcaacgatatggcaaaaaacgtaatgtcacgatggtggagttgtctaacgagatgttggaaacgtatggcatgactcgttataagagtattacgatcaaagatgatccggaagccctgcggtttacccgccaatgtctggaagcggaccagaaaggggcccggaagatcaaagaggtgacggacgatggaggggtagtctccgcttattaccagttgaagggcgtagaagcagatatcaaccgttttgtcctttttaaggtcagcaagaaaggggtaataaccttggtgtacatcgagggagatttggatagtgatgatttaatcacgctattatttacgaagaaagatttataaacaaacaaaacagataggaagatgaaaagaatacttttagtcttaatggcttgcttcccggtaatcgggttgatggccgctgaggttgagcctttggctggggatacgattatcacccttgagagaaaacgtatcgaggtgaaagataatggcgatcgcatgaaagtcagggtgtatgaggtagacgaggatggtgattccgtggacgacgagttgatcttcgaagggcattaccgggacggacaaagctatgaacgccgtaaacacgtgaagtctatcaatatccctgtgcctacttgggataaggacttcaatccgcattgggccggttttggaatgggcttcgcaaacttcgcggatgggagtttacatgtaaatgatgtagacggagtctcccttcgtagtggaaactcattggaatataatttgaatgtattggaaaaagcgttcccgttctctcggtatcgttgggcggtggtgatcggtgccggtatgcgttggagccgttaccggatagatacgaatgagtatttcaaggagatagacggtgttacggctttacgtccggctcctgagagtgttacgttgaaagcgagtaagctgaatatcacgagtctgaccattccgttgttattggaatggcaacctaaaaagcgttcgagtgaattcttcttgtctgcgggtgtagtcggtgtgatcaagacttgttcttcctcgaagatcgtatataatgacgcttccggtaagaagcataaggagaaaatggattccggtatgaatatccgtccggtaactatggatttcttatttcaagccggttgggattggatcggtctttacgctaagtactcaccgatcgacctctttgaaaatgggaaaggtccgaaggtgcatccggtttctatcggcttgcagttgcatttgtaggtcgttgaggttttgcgagataaagaacgtacgatatgccggatcttgttagcaaggttcggcatttatcttgaaagaacttattttatacttttttgatggtgatcgggaagtattgcaaacttatccggcgatatggccatttcttaatcgtggaaataagatgaactttgcaatataaatagaagacaaagtaataataataaaaaggaggttcaagatgggttttattaaggtaggtgtcgtattgtttgcaagtcttttggtaggaatggcgaacgctagtaatggaaataagaataataacaataaaacagaaaataaaatgacagtaacagaattaacacaagaagatttcgtaaagaaagtgtatgactttgagacaaacccgaacgcttggaagttcgagggtgataaacctgcggttatcgatttctatgccacttggtgtggcccttgtaagatgatgtctcctatcttggatgagattagcaaagagtacgagggtaaaatcaacgtatataaggtgaatgtcgataaagaggcggatttagcgagtgttttcggtatccgtagtattccttctttattgtttgtaccgatgaagaaagaaccgagtatggttcaaggggctatgccgaagaatgagttgaagaaattggtagatgatattttattagagtcgaaataactcgtatagtgtgttttggggattagtgacgcggaagtttgctgggaataaagtgaacttccgctttttgtttatataatattgttatctttatccgtcttaaaatccggaagaaatctatggaatatatttttaatactcgcttaagaggtaatatagcgttgaccgattcgtatcacacgaaccttgctttgcagaaagataatacgctttacaagtttatttgggtacaaagcggttcgttgcaactggagatcgatcacgtaccgactaccttagtgaaaggtgagattattcccttgactcctttgcaccatatcgagttcaaggcgatcaatggcgagtacttgacccttctgtttaacagtaacttctattgtattttcggacatgacaatgaggtgtcgtgtaatggttttctttttaacgggacttccaatgtgatgcaattgaaattgagcgaatcccaagttgcctctttgcgcgatatcaccgacagcctaacgagtgagtacgccataaaggataatttgcaagaggagatgctgcgtatcttactgaaacgtttcattattttgtgcacccggatcgcacgtgagaagttttcggtaagcccggaacgggaaaaggcgttcgatatggttcgccagttctatgtattggtagataaccattttaaggaaaagaagatggtccaagattatgcggatatgctgcatcgctccccaaaaaccctatccaacctttttacgacttgcggattaccttctccgttacggatcattcacgaacgaattgaggctgaggccaaacgattgctattatatagccagaagagcgcgaaggaaatcacggagatcttgggcttcgaggatcaagccacattcagccgttttttcaagaaaatgacgggagaaagcgtctctgagtaccggaaaagagagaaacgggaataattgctaactcatccggtaaaatcgccatttacgggataggtgtttctaccgatctttgcggtataagttcaatactataaaacaaataataagatgaaaaagttgaatgacctgttttactcgtttttgcaagtggcggcctctactcagaagctaggtattaatttgatccgtatatcgatcttgatcatatttgtgtggatcggcggtttgaagttctggaattatgaagcagaaggcatcgttccgtttgtggcgaacagccctttcatgagtttcttctatacgaaaagcgctcccgaatataagacgtataaattaaaagagggtgagttcgatcaagcgaagcatgagtggcatcaagagaataacacgtatggcttctctcgtggcttgggaatcttgatcatggcgatcggtatcttgactttcctcggcattttctcgccgaggatcggtttggtaggagcggggttggctataatcatgacgttcgggacgttgtccttcttggtcacgactccggaggtctgggtacctaatctcggcagcggggaatttggtttcccgttattatcgggggccgggcgattggtgataaaagatacggcgatactggccggtgcgatcgtggtgctgtcggattcggcgcaacggatcttgaaaaagaaataagcgaaacaagaaaaaggggaatggttttaatgccattcccctttttcttgttggttaccgtttattctgtacgatattcgggtttgcgtcgatctcgctttgcggaatcgggagtgctacccggggatcggaagcgttgatcacctgtgcgtcggtaggtaattgcggcaaatgccaaccgcccttgcggattaccggaatattgttacgcatgtaatcaaagaacgcatgtccttcgccaaccaattctttgcggcgttctttaaggattctctctagggaaagctcggagtcgctaacggatttattggggttggctcggcttacgatttgattcaggtagcctaacgcctcgctacgttttcctagcttgaaagctgcctcggccgcatttaagtatatctcggacagacggatgatgcataggtcattgtcttgcggattgccggtcaatacatctcctgtttttccgggatacttcgccagatatttaggatgtccggtcgaaccggttggaaggatatcctcgtccggtttttgaggtaagcggcataaggcatggcgaacatcatccgggtcttcacccagtaaatccaagaaatctttcgtcaagaccaaattgttccaatctttcacgttatcggcatataccatgggagcgccctctccgccactaccgccggaaggctcggtaagcgtaaagtagaactcgaacagggattcggaattgaagtcttttccccatacggaggtatactcatcgtacgtgaacaaggtataaagacctccgttattgattacttcttgagcgtatttaagggcgttctcgttgtcgttcatatataaatagatacgagatagaagtgctttcacgctccatacattttggtgaccgtcggatttggttgtaacaaggttgggtaaggcttcggtcaggtctttgatcacttggttgtagcattcggctaccgtgttgcgagacggttggtgagtcggcaactccgtcttgatctcgatgggcacacccaaggacgccccattatccagtgtataaggcatgccaaagaggcgggttaaatcgaataaggccaagccacgcatagccaacgcctctgcttttatacgggcgatttcttgcgtgtcggaggtttggacgctaccgttgtctattttctcgattaagctgttcgcttgatgaatcacgatatagggttggttccatactctcgtgatattaaaagcgtcgtcggcggctacgttgaacagatagtacggagatacacgtctgccgggacctttgtcaatacgagcttgtacgtcttcgccacggcagtcggcataatagaggtagttgtctccataataactatgctcggatgctatgcgatagattccatttaatgcggttttagcgtcttccagtgactgaatagcgttatcgctggttacggaagtggagggatccagatccagccaatctccggaacaagccgtgaataagaaaggaagagcgcttacgatatatttaattgaccatttcattgtatttcttttttatcgaatgaattgttgtgtttagaaattaacttccacgccgaagctaaaggttcgcatgggcggtgtctcgcagaatacctcgccggatacgggcacttccggatcatattgcttccatttcgcccaagtcagcaagttgctgccggagaaatagacacggactttatccagcaagactttatcggtccagttatgaggcagggtaaacccgaacgtcaggttctttaaccgcaagtgatccgtactatgtacgaagcgagaggaaccaccgctcactttgtcggagcgtcccaatacgaaacggggaatgtcggtgatatcaccgggcttttgccaacggtctaactcatagatgggcaggttgcggtttccttcgctggctccgtctgtctcgatatacgtaccggtcttgtcgaaagaatagccgcccaatgaataagagagcgtaaaggccaagtcgaaccatttataagaaaggatattggtaaggccgccggatatcttcggatctacttgtttataaggaaccgcttgcgcctcattgacatcttgggtcaaggtgcggtctagattgccgttctcgtcttccgtatttttataatacagcgcatttccgctcgagggatctaccccggcgaattcctttacatagaatgtattgaatggcaatcctattttccggataaaccaactactttctaccacttgatcgagattaccatcaagggccacgatcttattcttgttatgtgtcaagttcaataccgtagtccaattaaaatctgcgttcgagatattcaaggaacgaacctccagctcgacacctttattgtttaactgccccagattacccagatagttcaggaatccggtcgtggcgctgatcggacggttgtaaagcaaatccttggtgtcacgattgtaatactcgagcgttacgaagatgcgatcgataaatgcgaggtctagtccgaggttcatattatagttcttctcccattttagattgggattggcttgtgtgctttcatacgaaccggggttatccatatagttctttccgtaactatataaacccatataaccgtaataagatcccggctgattaccgttcacaccataagaggcacggatcttgacatcgctcaacaccggctttacggctttcatgaaatcctcggctcccagatgccacatgcctgagaccgaccagaaattaccccagcgatgctccggtgccaatcgggaactaccatcccggcggaaacttccggcgatataataccggttgtcgtaatcataattcaagcgggttagataagaaagcaaccgataatcctgtgtagaggatacgaaactgtttataacggcggcattgtccggctcgaataattggtcggacggcatcttgcttttctcaccggcggctttatctgtctggaaactttccgcctcataagcggctagtacatccagatgatgtttgttggcgaatgtcctcacgtagttcaacgaggtagaagagatcaatttcccgtattcgataaaacctttggacgattgggcatcgctaccgctcttgggacccgccccgcttaatgcgttgaaatagcgggcatccttttggatgctataatcatagctgagtacttcctttaatttaagtcctttgataatctctaccgcaccgtgcgccgtaccgaagatacgggtcatacgaacccggttatagtcggtacgcatatcccgcaaaggatttacgttcgttccgggataggtattggcgtaggaaccatcctcgttaaatactgggtaggagggaggagtggctactgccatgcaatagaaaggattgatactggatgtacgttcctcgttcatctcttgattcacttgcgagaacatgaggttcgctccggcctcgcctcgtttgccgatcttttgttgtacgttaaagcgtccggagtatcgttccatcgatgagttctccaccagaccctcttgtttttgataacccaaggagctgtagaccgtcgtgttctcggagccaccggaaacggaagcctcataattttgatgtacggcctgtctcatcaacacgtctttccaatcggtatagcctaaagcgggaacagaggtgtatgccccgatattggcgttggcgtactcttccggagtctgggtgaaagatgcgggatctttggcgatctggtcttgcgcgtaattaaccaagccttcataaagtagttcccggcgttgctctccgttgagggtcgggcggaagtctaccgccgcgtccgagaatcctgcgctagcgttcaacgtgacccgggtacgtcctttcgatccttgtttggtcgtgatcaagataacaccgttggccgcacgggaaccgtaaagggaggcggcggcggcatccttgataaccgtgatattctcgatatcggagggattgatcgtactcatgatgttggtcttggcattgttcatgtaggaggcctccgatccgcttccggtacttaggtttcccgaggtgacgggaactccgtctatcacaaacaaaggttcgttcgatgcgttgaacgagcccataccacggatacggatggatgcgttcgctcccggttgcccggagcttcccgtgatattgacaccggaggtcatgccttgtagtttttgttctatggaaaccaccggcatctctttcagtaggtcagcccgtaaagtgttggcggaaccggtaaaggaagaacgtgagaagttaccgtaaccggttaccacgacctcatcgaggttcatcgcctccggttgtaaagccacgtttaagataccgcttttcgggataggtacttgggtctgcttcatgccgatgtaatcgacaataatgaatttggcgtcaggatcaacttccagcgtgaaatgcccgtcgagatcggtctctgctcccgacaggctcccttttacgataacggtcgctcctatcagaggctccttgtcctcttgggaaatcaccgttccttcgatctgtcttttttgcgcatacgctaccccgggcaatagaagtagacataggaatagtatgccccatgtttttacatttctcatctctttttgtttaaaacgtcttattaatacctatactaactaaaggattatctgaaaaaggcgtgccagatgtgataaatcctgtagatttctttataattgttttcttatgagattattacgaaaagctttgaatacgggtgtggaggtggcattgtgtaatatttcctcatttgatgtgcaatttttctacactacttgttatctttgtgaaagatgatttaataggattcgtttatggacacaagaaagattgaggatgttcctttcgaggaagtacatgagatacaaagatatgggacttatttctcggagaagagtttctggaagaagatagagcgggtagcgaagaaagtgggggctacggtattgcgtcctgtcttcacgctgtattatatgttgcaggatgaaaaggtacctcttcaacataaggcttatataatcggggctttaggatactttatattgcctttcgacttgatcccggagagcgtgctccccattatcggcttcacggacgatgtggcggtgatgactttcgtattgaaaatggtgaaggatagcattacaccggagatccggagaaaagcggatcagaaaatactggatctgtttcctgatccggcttgatagggcgttatagcaacgggcgaatatcgggaagctcctcgcttccctttttcatttccggaaggaggattaaggggatctccgggaatttggcctttagatactccaaggtattcgcctcgatcagcgggtcgatgcttggatattggttatagacgatggcttttacctcgataccgtatcgctcgcaggcgtacaggctgagcaaagtatgattgatacttcccagcttgccggacgtgactagtatcaggggatacgcctgttccttcacataatcgatcgtaagggattccatgtcgttcggaaccatcagtcctccggctccttccagtaatacatactcgtaggtctctcgcaatcgccgggtggcttgggtgatcgtttctaaatcgatacgtcttccatctttcgccgccgccatatgaggagagcagggataggtgaagatataaggacaagtcagtccttgcgtatcctcgtcggtaaaggggagcccttggatttggcggtgtgcctcgatatcctccgatacgtgctcgcatccggtctgtatcatcttttgggtgatcactttctttccggctttcgccaatgccttggcgatcattccggtggctacggtctttccgacgttcgtgtctatgccggagataaataatacattttctttcgtttgatggttcattgttctgttgtttaaatagttgcttgattaatcttttgtctctatggatattactccttgtctctaagagatttattcctattcttctgcgctattgatcttttcacctttgtgaaaagaacgtatcacctttgtgaaaagatcgtttcacccttgtgatacgattatatcatataggtgaaaggatcaatacctcggaagaggcgatctacctcacctttatcttttgaccactaagatatagagtggacggtaagttaatgtgaccccaccatccgccgaggggaatctctcttgataatcccggcagaaacgttcctgttttccccgtgtccagacgcaagaggcgttggccgtgacacccgtgtactttagatgtcttagcacctccagcgggtgccggaaggtcagggcgatatttccttcctcttcatggacgatccggaagtaggtggataaccactcccttaattgtccggcggtaggataggtgagcccttctccggtcagttccttgatctcgtgaaggttgtctggcgtgaaggtgttgaaagccagcatgcctccgggcgatagggtggacgatagcttatggaggaaacgtggaaggtctttcatccattgcagggcggaggccgaggcaatcaagtcgaacgtgccgggaaaagccagtcgctcggcatcaccggccaagaatagaggagtggcggaaggaaacaactcctcgatggcgctttgccaagtctcgcaaagatcgttgagtacccattcctcgatttggcattcttgttttaataaacgggtgaatccgccgcttccgcaaccgatttccagcaccctgcggaaatgagaggaggtgtatacggtcaatagctgtaccagatgggcgcatatccgtttctgggcatccgcatgatcgtcgtatgtattcaccgcttggctgaaacgccggcggatccgttcttgttcgattacttccataattcgttccatgattgatagtggtaaaaaggaagatgaggcgccttgatctcttggatggggcaacggccttgccagtagttccggaggttggttgccgggaatatcttatcttcggtggataggatggcttgatcccagaaggtggatatccgcggatcggctgattcgagcttttccgggaggatctgattatatagagattccagttcctccttgatctcttccagcggacgtggtgagagttccgaatagcgattgaatgtctccttgtctccgcacatcctgcggttaaagcgacgcatgccttcctcgctgatatgatggagggttccctcgaagatcgcggtcgggatgcctagcgtatcgtgcatgggaaaaggggtaccgttcagggcggtcgccgtggtaaaggatcggtggcctgcccagagtcgggtggctacccatacgcctagagaccaagcgaccagatgtacctctttatagggggcgaatgtctcttcgaatgcgagcgtcctgtaatcgtaggcaatccataggtctgtctgctccggtacttccagatggcggaaaagctccggcgaggtggaccagccggcgagacagaggatcagactaggggatagcttatttattatcttatctatatacatactatcaattcaatttatatacatactatctatccagttatctatccgggggtgtagagacggggcatgtcccggtgggagacaaggcacgccccgtctctacaatcagttgatgaatattttttattgtgaggtttgccgtaagggagaagcggatacgggaggtacctttgggcactgtcggcgggcgaacggggaggcagtagaagccttttcgttgtagctcttccgctttccgtacgcaatcctcgctctctcccacaatgaaagggatgatgtggctttggctgatctcgcctcctttgcccgttaaagcctccgccagcaatcggctatatgctagaagattctcccgttccttcgtgaacgaggggagttgctcccagatgaaggaagtccatgcgatttggaacggtggcagggccgtactgaatatgagcggtcgcatcgtattgaccagatattcccgtatcgtacgggaacaaaccaaataggcccccatagacgctaacgccttgccgaaagtaccgaccaatagatcgatctcttggatacaactttgttcctcggcgatacctagccccgtctttccacgggctccgatggcatgagcctcgtctacgtacaataggatattgggatattgccttttgatagctatcaggcggtttaaatccgctacatccccgtccatgctgaaaatgctttcggtcaagatgatgatcgtctcgtattgacaggcgttcttttgtacgaggcgttccagttggtcatagtcgttgtggcggtaacggaggaatggggagccactcaacaagatgccatcgatgatgctggcgtgcaccagcttgtcggcgagtaataaggtctgtttatcggttaaggccgggaggattccggtgttggcatgatagccgctattgaagatcaatgcggcttcccggtcgaaggagcgggcgatctgtttctccagtttcgtatatacggagaaattacccgtcagcaagcgggatgatgatgaggagtagggatagaagcggtcttgtgtggatgcttgaaactcctcttgtaaatcctgccggctggctaatccaagataatcgttggaagagagattcagcatacgctttccctcttttaatatccatattccttgatgctcgacttccggtaggtgcctaagattcccggaggctcgtaaagccgtaagttgctcgttatatgatttcatatatctatatattacccggttgtagatatgttaattatgcgttaatactctcaataatccggaggttagtctggatagttcattcatggagataatgaaaggaggcatgaggtaaaccagccgtccgaatggacgtacccatatcccttcctctacgaattggcgttgtaataccgccatatccaccggatgcttcatctcgataaccccgatcgctcccaatacccgtacctcagcgacttcaggcagtttggcggctggcgctaactccgcccgcaattgctcctctataagcttcactttctcctgccagtgactggcgatcaataaagagatcgaggccgaagcgatagcgcatgccaagggatttcccataaacgtaggtccatgcataaagcatcccgcctcgccggaacagatcgtgtcggctatcggctttgtcgtgatcgtggcggaaagcgtaagataacctcccgtcaatgcctttccgatacacatgatatcgggttcgactcccgcatgttcccatgcgaacaactttccggtacgtccgaagcctgtcgctatctcgtcgaatatcaataagacgttataccggtcgcaaagttcccgggcacgaacgaggaaagtgggggagtagaaatacatgcctcctgctccctgtacgaccggttccaagatcaaggcggcgatctcgtcggcatgccgctctagtaaatcccgcaagggagccatggcctcctctctccattcctcgccgaatcggaccgaaggttgaggtatgaagtattggatgggtaggcttccggagaagatcccatgcatacccgtcaccggatcgcataccgacatggcgtgccaagtatccccgtgataaccgctacggatcgtggcgaaggtatgttttcccggtatgcctttggactgccagtattggatcgccatctttaaggctacctccacggcgaccgagccgctatctgctaggaatatcttttctagggaagggggcaatagcggtagtaatttagcggccaactcgacagccggctcgtgcgtgaatcccccgaacatgatatggctcatcttatccaattgggctttagccgctgcgttaagtaccggatggttgtatccgtggactgccgcccaccaagaagacattccgtctattagctccctgccgtccgcaagggttatcgtcacgccctccgctttggataccggatagacgggaagtggatcgatggtcgaggtgtagggatgccatagatgatcccggtcgtattgtaaaagttcggttgttgtcatttttcccaatcggtgttttcggtgagtgaatagccttcggaggtaaataagactttgtcttcctctaccttgcttccgatagtcgttaataagtctccgatgatcgcggagttaatcccgatatatagggatttccgttgcgtggcctcgcttaattgtgcccgtccgccggagaaacggagaaatgcgttcggattgatcaagcggaaaagggcgatcgttgttagccattcctcttcttctaggatctgtgtattctccataggagttcccggtatcggctgtaataaattgagagggatggataagactccttctttctgtaagaaacaagccatctcgattcgctcctccatcgtctcgcccatgccgataatgccgccgcagcagatacggaaaccgatttcccgggcggtatggatggtttccattttctgctcgatcgtatgcgtggaacagagttgacggaaataggaaggggcggtctcgatattgcagtgataattctccactccgctatcgtaaagcgattggagttgggagcgggttagcaatcccatggaggcacagcatttaatatcgctttgccgcttgatttgccggatcgtatcggtgatctgttccaattctttatccgatactcgcttaccgctagtcaccaaggcaaaacgccggatgccctgtttccggttatataccgcatgatagacacattccttggccggaagcaaaggatataagtttacgagggtcttgtaatgtcccgattgtgcgcaccatttacaatcctcgctgcaattaccgcttttggcgttgatgatggaacaagtgtcgaacttattccccataaaatggcgggtgatttggtgggcggcctcgtaaagtgcctctttgtccgggtgattcgccaagcttaaagcctgttcctcagtaatcttcctaccctctaggatgtactgctttgcttcttctattgtcattttctctcatttaataattctacgtatatatacccagttgtagagacggggcacgccccgtctctacaaccagatggaaataagaaaggcgggaagtatccgaaagaatacttcccgcctttactatattatataatgtatagtgagctacacgatgagccggatgagcgatctcatttgataccaataccgggagtaatgccgtaaacagtccatgcgataccgcgaggctccgtttgttctcctcggtattctccctctcctcgtcatcctcttcggaaaatccgtccgtgaacgtaccgataccggtatgtaaagactggttctttttctcgaagcgatcggctacggaaaaggataattgtccgatcgtaacagctctctgtacactgatgaaagccgcatacgccttccggctccatcttctgaaacggagtgcctgcgaacgatatgtatacgacttcctcatcctctaattttcaattgtcaagccactttatccagtttcttcatgatagagaacatgaacaacgcagacagtaaacaaagaacgatcaacacgctccataccatccataactgcatgcctccccacaaataaccgatgatagcgaccagatagttaccgatagccgtagccacgaaccacccacccatcatcatacctttgtatttaggaggagccactttggatacgaaagagatacccatcggagaaagcaataattcggcgaaggtcaataccagataagtcgatatcaaccagttcggagaaaccaatacctgcaatttgctatccgccgctaaagcgtccggtgtaggcaagcccatagaaccgatcgccaagatcaagaaaccgcaagcggcgatcatcatacccaatccgatcttacgaggagcggacggctctttcttcttattagccagataaccaaagatcgccaacgataccggagtcaatacaaccacgaagaacgggttaaattgctggaaggtctgcggaaggatcgttacggtttccggcatagccatatatttgatacctagagcggctaatgcggccacggtcacgatgccggcgatcgttttgcctttgctcgttgtggattgtgcgatagcgaatcctccatacacggcgataaccaataatgttaagttaatcacatcaaagccgatacgatccagtccggtcacttggttggccgtatagtcgcgagcaaagaacgtcattgtcagaccattttgatggaaagccatccagaagaacaataccacggcgaataccagcagcaaggcggtgatacgttgtttcgtctcggcaggtgacaattcctcttgcggagcgtgggaagcctttgcttgtttggtattgacatccgcatgcttaaaggtagagcggaatcccatatagatagccatcgatatgatcaatgagatacaagccacaccgaatccatagttgtatgcctcagacaacttctcgatatacgtggaacagaacgtagccatatcgccggtgaaaccttgtgcgctttgcagagcggcgagtgcctctttgttctctgcggagatggttccgtttaagaattggtgagcgagtgccggaatttgtgactcgtagaaaaggttatacttacccaacatccagtctgtcattttagtggcagccgtaggtgcgtacatggcaccgatattgatcgccatataaaacaaactaaaggcttggtcacgtttacttctatattccggggcatcataaagattacctaccatcacttgtaagttacctttaaataatccggtaccgcaagcgattagcgctagcgagccgaacatcatgatttttcccgaggcggcatctgttgggatggctaataaaagataaccgacaaacatgatgatgatacccgaggtaaccatctttccataaccgaacttatcggccatcataccgccaatcaatggcataaaatacacgaacgctaagaagctagcgaaaatcgttgatgtctcagcggccgtatagccgaatttcgcttgcaagaataatgtgaaaatcgcaagcatcgtgtaataaccgaagcgttcgcccgtgttcgcgagtgctagggcatagagacctttaggttgtccttgtaacatgtgttttagataatattagtttatacttattgaataatttgctttatggcgccggtttccggatagaaaagaactttgacgggggctttcttatcctcaaacataacaggggctaatccttcccgtgttccgaattgagtgatttgggcctctcctttgtagagcgtttttttgttcattagtatttctatgctggcttttcccggaacattgtagacgattcctttcaatgatttgtctttcttctcggcttccttggcatcaaggatcggagctctttctgtcgctttcaagttcatatagacaggggtaccgcccaaatcgtcagcgtctacgatacctagctgcttggagaaacggaacaatacttctttatctaggttgtcgtgggggatgatacttacctcataatgctcggtttctttggtcaagattccggtgaataggtttgttaatgctttttcttgctcctccaattgctggatcaccagtttcatggcttcaccatcgggaggtaaattatccgcctcgccggtcaagatgttcaaacggctttcccggatacggtaaatttgtttagcggccacctccgcttgtttggcggtggagcctgccattagtaattcctctgagaaaacggaagcgtctgtcactttttgttgggagcctttatttttctttgcggcatctagctcggattcaactggtgtatattctgcgtttatcgagcataataatccatcttcggtaagataagcgtaaggggcgaccgtaccttgtttgaattctacgatataggtattatccgcatcgggtaatccccggttgatcagactgatttttccgagatcgaaataaaccttgtcttccgtgaccgcatcctttacgcctagatacttctctgcatattgatagtaaggcccggctttgcaagttactttcgtcacttcggcgtctacgactagcgaggtcttgggcaacgagtaggtgattccgaaattattggcttttacggcgttcttttttaccaccttggtttgtgccataagcggcatcccgaggagtaaactagctataatgattatattcttcatatcccagtttattttaattctgtatattattgcgcaaaactaggaaatattttgcttaaaaccaattggaagtattcttattgcatgaaaatcccggacaacattaagaatttctagattcgcattgttcgggattctgaggatgtccgggggagaaagcttaaaatagcacgtctatatagatcggcaggtgatcggacgactggatatcgatcacttggtcgttgataatcctaaattcatgccttaggtcgccgaagatataatctaaacgcaaacggggatgatccgaggggtaggtctctaacgtagggtcggataagagcctccacgtttgtttcatcgccttgaattccttagagtctggctccatgttgaagtctccggtgatcaggattggtttgttttcgcttttcatcgtctcattgatgagtcgtatagaggccaggcgagagtctgggtcgagcgagaaatgtgtgttacacaaggtatagttcggatattcgagacaaaggaaggtacgtggctcttcctttcccggcagaggtatgtattggtagctacgaggttttttgcgggagagtgcggcgattccgtataatcccttagaacgttctgtggcaggtgcgaagattggatacatgccggtcaaccgtgccaattctgcatattggttgatccatccagagcgttcgcatacactgtccacctcttgtagcccgacatagtccggctggatcttgttgatcacttcagcgattcgcttcaaattggtctgttggtccataccgatcccgatgcggatgttgtagctcatgattcttaacgattgtcgtgtcttgcataggccacttcccaaatttaggagggcgatggttaggagaaataagattcgtttcatggatttctaaggtatttcgtgaatagaaacccccgcagacaacaagaaggactatctgcgggggctacagtaataaaaattgaagattaataattatcgttctgtgttaatgcgcctcctacatagtcgatctcgctttgtggaatcgggtaggggtatgtcttatcggtgacgagtgtcccggcaccggaatacttgccctcatcagtcttgccgaatttctgcattgtagatacgaaggtgccccagcgaattaagtcgtagaagcgtaatccctcgcctgcaagttcgatacggcgttcgtggcgaacggcggcacgcagatcatcggaagctttcactttatacttagcgttgaaagtatcctcggtcactcgatcgctctccttgaggttgaacttacggtatttagcgtagctatctgtcaaagaggttgtcacgaaggcacgataacgtacttggttgatcaggtcggccgctagttgtttgtcgccatccgtctcgatcaggcattcagcgtacatcagcaatacatcggcatagcggatgtgatagtgggtccaatccgtgttcaataaatcgtttagtggccgtctggagaagtctggatactgcttacggctgtgttgctgtgggaaattgtcgtagccggaatagtcgtgtacctcttcggaaccatcgttcttgacgaatatatcgccggatgacaataccgtgtgtaccaagcgtggatcgcctacctcatattcgtctaccaaatccttcgtcggacactcgccgccccatccgccggcaataccgcgaccgacattcatttgtggacaaacgctaccgctagtgtagctaggaatgtaagagcgcagggtgatgaagacggactcttttgacatatagccctctgtggcgttattgaatagcttctcgtagtcatctactaattcatagcttccggattcgacaactgccttcaggtctttcagagcctctccgtagttgccgtagaacatcaataccctagcacggaaagccatggcggcctctttggtgattcgcccaatctcgctggtcggaaggctttttgcattaggtagattaggttcggcgattgcggtgttcaggtctttcaggataaagttcatgacctcctctttgctggatttcgtgatcgtacttttgtcgacgacttccatgggcttgtcaattagtggaatattctggaagattgtagctaggtcgtagtaatagaacgcacgcatgaattgagcctctgcgatccatcgctgtttggtttctgtgctgaccaagcctccggcatcatcgatcaattctgattcaggtgtgattagcgacaggaatacgttgcaggctgagatcgctgtttggtagcgatgagtccaaaggtcggacaagacttgattagtcgccattggtgttccgcgggcgatttccgtgatacgaacgcggtctcctgcatcagagccgcctttggagcagtcgtcgctcaattgatctcccaagacaaatttcatgtcctgatagttccagctatcttgtaagggctgatagcaattgaccaaaagtttgtagccggcatccttggtactcagataagttacctcatccaatgttcccaatggcgggcggtctagaaagtcgctgttacagcttgtcgtaagggcaccgacgcatgcgatcgatacaagtaatttccctatgttaactatagatttcataataattcattttaagattataatttcaaactaagaccgaacatgaatgtacgcggttgcggatagaatcccatatcacagcctttgtaaagaggcgagttattgatctctccgatctcaggatctagtccggaataaccggtgatcgtgaataagttctgtgcggcaacaaagaaacgaaggttgttgatcgtgatcttcttagtccattcggacggaagcgtataaccgattgtcaggttcttcaagcgaacataagaaccattttccacataccaatcggacatctccaagttcatgcggctatccgcatcgattgcgaagttctcgtttgtactacccggtccgttccagtaggttgttaatatatccttcggagcattgtaccaaccggtacctgaatagatgtcatatttcaatatgtttaagatgtcattgccgactgatccttggaagaaggcggagatgtcgaatcctttccattctgcgcctaaggtcaaaccaaaggtgaagtctggatgaggatttcctgtcatcgtgcggtcttcgtcgtctagtttaccatctttgttcaaatcttggaactttaagtcgcccggctttgcgtttggcattaccatttgaccgttgttcttgtagttgtcgatctcttcttgggtctggaagacaccatcggttttatatccgtagaaataaccgatcggttgtcctggctctgtcatcgtataggagaagtatcctagatggatgcctttacccggaatattcgctccactacctaggctttttaccttatttttataggtggatacgtttccgttgatatgatattggaagtcgttcccgatcttaccgtcgtatccgagcgttacttcaaaacctttattgcttacgctaccggcattcatccacggcgtgttggggaatcctagtgaactgggcacgggtacttgcaccaacatatcacttgtctgacggtcaaagtagtcgaaggttgctctcaaggaaccttggaaaaaggccaaatccaatccgaagtccagttggcgagtagtctcccatttcagatccggattacccacctgcgtacgtccggcatacaagttcgtctgatacggattaccgaagaggtagtagctaccatttccgaacgtattcatataggctccggaggagatagtctggttcccgatctcaccccaagctgctcttaacttaccttgtgacagccactcaaggttcttcatgaagctctcttccgagaaattccaaccggcggatacggaggggaagtaaccccagcgattaccatccgcaaatttagaggatccatcccaacggatattggctgtgatcatataacggttgtcaaaggaataaaatacacgaccgaaataagaattcagcgtactcgtggcgtagtagcctgatgcggcgggattcatggtaccggcgttgatgatctgctggttcgggttgttgttgacctgtccttctttataggcgtagatctcctcgtagcgctctttctctgcggaggtaccgaccatggctgttaccgcatgtttgtcgaatttttgattgtaagttaggtaattgtcgaatacccagtaatctttattcgctacgctccgactggcgcccgcataagtggagtactcatctccatccagatagtaagaaggacggaaagagtcgctttggttacggactaagtcaagagcgatactggatttgaaggtcaagaagggtaacaacttgacttcgccggagatattacttttcgtggcgatcccgtgccattgatttaatgcggagcggtctacctgtccaaccgtgttcggtttgtttgagtaaattacgcctgtatagcgagaccaaggattggtcggctcataaccacccataatccggttttgcaagaaatctgggatatccactaggttgtcgcgatataccggagtgattgggtctgccgcaagggtactgaacacggttgctgtgtaagagttattctcatctaggttgcgcctggattcgtacgtgacgttcacatttgcggagaggttcaaccacttggttacctcagagtctacgttcaaccgaccggagaggcgttcatagtcggaacctttcaagattccttgttgatccatatagccgaagctagcacggtatctgagtttcttcatacctccggagaaagctaggttgtaattctgactgatagcttccttgggtttacgggtgctctctttccaccaatccgtaccggatcgtcctccgtttttccctaggaaagtaaggatctgctctcgcttctctgatgtggcgaaatcatcgatcaaggctttcccggatgcggcgtaagcccggttcttatattccatgaaaccttcggcgtctagcatgtcatacgttttcactacatcttggaaaccaatgttcatatcaaactcgatgttgcttcggtaactctcgccggaagctcctcgctttgtggatactaggatcacaccgttggcagcacgggcaccatagatcgcttgtgcggaagcgtctttcaatacctctatgctctcgatatcacgggcatttaaccaaccgatatcaccttgaggtagaccatctactacatacaacggatcattattattgatagtaccgacaccacggatacggacattaccgagtgaacctgggctaccggaactagatgttatggttacaccggctgcttttccttgcaaggcgtcggcggcgctgcgaagcggtaggttcgagatctcgtctccttttacttgagaaacagctccggttaaatctcttttcttgaaggaaccgtaaccaacaactactacctcatccaacttttgagtgtcttccgctaaagtgacgttgaggttgcttttattgcctacgttgatactttgttggagatagccgatgtacgagaattcaacggtagcattggagggaacattctctagaatgtagtttccgtccatatcggtcatagatccgattgtagtacctttcactacaacgtttactccgatcagaggctccccatcttgtcctactacttgtccggttagccgtttgcgattttggttggtggatggcaactccgtatctttcatggtcttgttggtaagtactacgtgattcttgacgatcttatacgtaatatccgtacctctaaagacattgtttaatacttgttctatggattcttcatggatattgacatcaacccgtttattcaaattgatttgattgtcattataaaagaatttatattcactttggtcttcaatcgccttaaaaacttcagtgatagttccttttgtgatatttaaggatataatttgtgctgatgccgctactgtgtacggctggaaaaaggttaagcacaaacctaaaaataatgattttttcagggttctgtaattagttctaccggaaccattgacattccccgatatgaaatatcagagatggataaacaagaggctgtggaagataatgatccttattcgatacttagtatttttgaaatagaacgaatcacggaaaatacgatagaggaattaccagatcaatgtaaatccatttttaaattgagtcgtataaatggactcaagaaccaagagatcgcagataaattggatatctccgtccgtacagtggaaacacagatatatagagcccttaagattttgaaaagtagattgaaagattatctggtttcttgaaaaaatataatacaaaaatctatcaatcttgtaagtagcacatcgttttgaagtgtcatacatatagaatcgagaaaaaacaatgaaagaatatataaaaaatataattgcggaaagtctcaaagacgaagtagatgttgatagggagtgggagcgtttgttttcatccatagagaaaaaaactatttccaaaatgaaaacaagaaggctattccttcaatacatgaaatatgccgctgccgtggttttgggcataggtgtttcactatcaacgttgtatcttacgaatcaagagaacttatcgacagttggaaattataaattagtaacgagcaaaggagagaagagctatttgcaattaccggatggtacgagggtttggcttaactcttgtacaactctagaatatgcggagaactacggccattccaatcgtagcatttatttggatggagaagcttattttgaagtcgcaaagaataaagacttaccatttgttgtaaaggcaaacggtattgatgtgaaagcgattggtacggcctttaatgtttccgcttatatggaagactcgcaactaaccacaaccttgttcaatggcaaggtcgccgtacaacctacgttgactaaacaagaggtcttacttgagcctaaccaagtggcggtttatgataaaagtagaaataagatagaagtagtaccttacgataagaaactattcgctcaatggagaggaggtttcttgtcttttaaaatgatgtatctgcaagatataacaaagttgttggaaaggaactataacgttgtatttcgttatgaaaatcaagggataaaaaaattaaggtttagcggtagtttccgtaacaacgaagatttatcggagattctcaatgtgataaagacgaatacgggtattcgctatcaaatactgaaagatactatagtaatcaaataataaatcattgaattattaatcttaaaaacagtcttgcttatgagaaatggatgatttttagtgtaatacggataaaaaacgtaacattgttagatcttattattaatcttaaatttattaattatggctaatcagatagggagttccggtagaacgaaggtaattgaggcattcgttctgtatagccctgtataaataagcgtttaaagacgtgtgaatatcgatgttctcacgcttttcccaaaagcggaggaagacgttttgtaagatgtcttttgcgtcttccggggcggggataaattttcggcaatgtatataaagttggagataaacagacttgaacagggtattaaaggcggctatatctccttgtttgatcaattcgattattttgttgtcagatgccattttattcccgtgtattattagaaaggtggagcgtataggctaggagaacgtcccttgggcctatacgcttactacctgtcaattaatgctaatccctattataagatttcgtttgcggttttattgaagtattggatacattctttaatgtccggtacagagttttcccagttgtattcatactcgatagagaatactcccttgaaattctgggatttgagttctttcaacattccctttacatctaggatgcctgtgccccagatcacgtcgtgctgctcattctctcctgcttttttcggggcgatatccttgaaatgcaaagagatgattcgacctttgagttgctttaagcaatcaatctggtttagcccctcccgacgccaatgccccacatcggaacaagaaccaagcgattgactgcgtccggagatggctttcaacaggttctcaggtttccagtagtcggaaggctgcgggtgattatggacggagatcttaatgttgtattgcttggacaatttttctaccaagtcccagtcacttaaagccggttcgcaagtaatgaactctaggtccatcgctttcgcgaatttgaacatcttttcccaatcggacgacttttcggctacatacaccccggttcctacgatcttgatacctttggatgccgcaagctccttgatctctttctgggtctgcgcatcaaggttgaaatcgaatactttatctccccatttaccaccgagcttatggccgggataaatctcgatgtatttcaatcccagttcttgtgtcttatcgagagcttccgtcaaagggaacaggtggaaactataggattgcatccctagacgccatccgttcttctcggccttcgtttgcgcttcgcttggaatagccaataggcagcaaacgatcgctatcattattttatagatatgtcttatcatatttggctgttattaaaaggtttatcttggcatatccggcaaagagaaaccgttgttatacgtatgcttgatccattcgttggccatttccgcagcgttaaactcggcgaagcgacggtcgaaacgcggatctccgtcaattaccttgaaatcatccaccgtgacgatcttgatcttatcgttcggggagatgttcgtaaaccgcatgttctctccatcccattgcaactcacgatgcaaaccttgcagtccggagaggcgaacggccaagactcccatcacgaccatctcgttgaacggaccggagaactggaagttggatgaggcttccgtacgattttccggggattccttgcaagcccggatccagtcttgctcatgggcattggtggaccatatgtctccattgccacctttcactctcgggatcgtcggtttgggctggttgaaatgttccatgtcggaaaccggtaataaggtcgggttcattccataacagcctgtcatgatctttcctttcgttccgatgaagatgataccgccgttctcgtcgcccatcatctgcccgtctttcaattcttccggacggggaggcatcagaccaccatcgtaccaatagactttcacttccggcatcttgacatttcctttgggtggacgtgcggggaatgtataggttacgatctgtgcgtgaggaggggagtacaggttactcaaagtagagctgccgattacgctggtcggatattttaagtcgagtgcccaatacaacgggtccatgatatggcaagccatatcgcccaaggccccggttccgaagtcccaccatccacgccagttccaaggggtatagaccggattataaggccgcttttgagccgggccgatccataaatcccaatccagtgtcttcgggcacttcggggtatcgttcggcttcatcaagccttggggccagatggggcggtctgtccaacaatgtacctcatatacatcgccgattacgccagactgtatccactccgcgatctgccggcaccagtcgaatgagttaccttggttacccatttgggtggctaccttatatttcttcgccagtttggtaagcaaacgcgattcgtaaacggagtgggtaagcggtttttgcgtatagcaatgcttgcctagcgtgattgcgtgggcggtcacgccggcatgtgtatggtctggggtggctaccataatcgcatcgattgatttacccatctcatcgaacatgacacgccagtctttaaagcgtttagccttcggatagtccttgaaggtcttgtccgcgtagtgccaatctacatcgcataaagctacgatattctccgtgttcatgttggcgaggttacgacgtcccataccgccgacaccgatacccgcgatattcagtttgtcactaggagctgtatagccaaaggatttaccgagtacagaacccggaacgatcgttagtccggctgccgctacggctccggtcttgaggaaacttcttctcgaaatgtttttcataactattaaattttaagaaaacgatattctataatgtttgtaaatgaaggttgcgccaaagaaccttgatgccgccaccatcatgtatttgcaaagcgatacgcccttgaccggctccgatcttttcatcccggatgtttaccatctcctctccgttgagccaagtctgtacattatctccttgtacccggatacgcatcgtgttccactctccttgttttaggatgttctccttctcgtccgggatctgtatcaaccatcctcgtccgtaggattcgtagataccgcccgtgtcaaagcctttgggggcgacttccacttgccagccgtttacctttacatctttttcttctacaaaggaacgaataaatacgccagaattaccatccgcttcctgtttaaattccacggtaaggtcaaaatcgtcgtaatattcccgggtggctagatagccgtattgtttatccgggccactttcgcatactaataaaccatcttttacataccataattctgtgccgtatttatcccagtttgtaatgtcctcgccgttgaataaacgagcctctcgtgtcttgcggggaagttccttgatcttgatattacggaaccatgcgggataaccgtggtcttgcaaacaaatcaagcctttatgcgctaatccgtattcaggagcgttcgcccatttaccgctgttcttacgggagaaccaatcatcagaccatgcatcgaactctacggttttgtgcccgttcataaagtaggtgacatgtccgttgtcaaaaataatcttagagttgttccattcgccggccggatgtacttttatcgtgttgaagtccggtaaatacatcgcgtaatccactccgcaacgttgccaatcttccaatggctccgcgaaattgatatcatcaatcaattgatactcgggaccggtaacgtagggaaccgggaattgaggacgttctaccacatgatataataaaccgctatttcctcctttcgagattttccagtcccacgaaagctcaaaattctcataagccttgtcggtgacgatgtatccgctggcatcgctaccttgcccgtccgcttggatggttccgtttacaacttcccaaggtccggtcaaggcagttccgttataatcccgccagccatccaaggtttccccatcgaatagaagttcccaaccttccgctttctcttgttcggtcaatgtgttatgcttcgtgttatcacaggcgattaaaccgaaagcagctgccattgcgaacgatacgattgttattttcatgtacgtatagctttattgttaatacaaatttgtcggtgttttatatatgagacaactctggggcaagggatacgtaagctctttttccttttttatttattttaacggaagtgtatggcaatcggtcatttattagtcggcaaacgcagtagtactgactttgccaagtaatatatacaaacatcgccaacgcagtatatctgatttggatacactaaatacattatatgatgtagccaaatgttgctgtaatagttatggtatcaacgactgaagcttttctttacagaaaatactacaataagccagtaatcgaatactttatttaaagtgttgataatcagcattgtgaaaatatcatgatgtttatgctgaaacacgtacgtgttttcgaaaaaagtcgtacatgtttaaaaaaattcatgtacgtgtttttctataaaatgatagggatacaattatacatgtttaaaagttacaataactctactttacagagctttgtcataaaagatatcgccgacatttatcgagtgagtaagaaaaggttgaaatgtgatagcaaaaggcgttggggtaccatgaaaatttactaccaccattctatatgtacactgtaagtccgtataatatatggaatagcggtagtaattgtaacaaacgagagtaaaaacgcccgttgtttttgctggatttatttgatttgcttaaacgcttttccgagcatatccgtgatgtcgctggcgatcatgctctcttccgagcggaaagcggcggcgagatcaccggctgtaccgtgcaagaatactccgactacagcggcagtttccggagaatagtcttgcgccaataagctgaggatgatgcccgtcagcacgtctccgctaccggcggttgccatgcccggatttccgcaactattgaaataaatgtttcctgccggagaacaaatagcggtataagcacctttcaatacgatacaaatcttatgttcggcggcgaaagattgcgctttcatcaaacggtcgtatgagttcgtgctttcacccgctatccgatcgaactccttcggatggggagtgaggatgctccgtggcgggatcttattgaataagtccttgttggatgccattatattaatagcgtccgcatcgataacgactggttttgtgctggattgcaggatacgttcgatcgctgctgcggattctaaatgctgtccgagtcccggtcccataccgacagcggagtaactacctatctcgggaaccgtagagaaataatcaggatttgcgtctagacttaacatcgcttccgggaaagcggtctggaagattgattcgcctcgggtcgggatatgcacggtcaatagtccggctccactccgtaagcatgccttcgcggataatagggcggctcccatttttcctttacttccggcgatcaataaagcatgtccgaacgttcccttatgggcgaaacgtttgcgagactttaacgaataggatatatcttcttccgtaaccaatgagtaaggggaagccgtctcataaattgcgtccggatggattccgatatccagtattttccactcgcctacgtattgttcattctccggaaaaagaaacgccagtttcgggaagccgaatgtcaaggttaagctggccttgatgatcgcctccgagtcattcttacgattatcttccccgaataagccggaaggaatatcaatcgctacgacttccgcctcggattggttgatataattgaccatagcggcgaaacctccggtgagaggacggtttaatcccgaaccgaacaagccatcgatcaccacgtctcggtcggttagcgtcggcggctcaaagtcacggaccacttccgtaaattcgatccgttccatgtcgagcagacgctgcttgttttgctcacactctacggacagatgctctgtcgggttgaataaatacgtctctacccggtatgattcctcgttcaaaaggcgggcgatggccaaagcgtcggctccgttattgccttgaccggcgaaaatcacgatgcggacctgcttggagtagtgccggcaaaactcatggacgaacgtcgtagcggcacgctccactaagtcgatcgaactaattggctcgtgttgaatcgtatattggtcgagctcctttaccttgtctgtagcgaatatcttaatcataattctagatgtctggggttttattctgcttacaaatgtataacaaactttggtatgttgctacacttttttgtgcatcgccgaaaaagttgtacatttgtcccctcgaaaaccgaaagatttatggacagaattcgtctaaaagacaaagaatttgaactgtttattccggagtcggatattcaggcggctatcgctaaaatggccgttcagattaaagcggatgtggaagggaaaaatcctctattcgtgggtgtgctaaacggggcttttatgtttgtcgccgagctgatgcgtgagctggatgttccgtatgagctgacattcgctcgttattcctcgtatcaaggaacttccagtacgggcatattgaatgagatcatgccggtgcaggctgatattcgcggacgtatggtgatcttattggaggatattatcgatacgggctttacgatgagctacgtgatggagaagcttcggagcgagggtgccgccgatgtaagattggcaacgatgcttttcaagccggaatccttgaaatgcgagttgactccggattatgtaggcttacagatacccgctgattttatcgtgggacatggtttggattatgatgagttgggccgctcatataaggatatctacaaggttgtggaataaaatagtatacattatatataataaaggaacaatagtatgttgaacgtggttatttttggtgctcccggttcaggtaagggaacacaaagtgagttgattattaaagaatacggtttggatcatatctctactggcgatgtattgcgtggcgagatgaaggctgagacagaactgggcaagatcgctaaggattatatcgagaagggacaattggttccggacgagttgatcgttgatatgttggcgaatgtattggatagcaagaagccggctaagggcgtaatcttcgatggtttccctcgtacgatccctcaagcgaaagccttgaagaagatgttgaacgagcgtggaacagacgtttccgttatgttgaaccttcaagtagaggaagaggagttgatcaagcgtttattggagcgcggtaaagtatccggacgttctgacgataacttggagacgatcaaatccagactggatgtttaccatactcaaacagctcctttggcagactactatgtaggtgaaggcaagcacgtggccatcaaagggatgggaacaatcgaggaaatcttcggtcgtatcaaagaggcggttaataacgtaaaataattgaaataaaccaatatggctgaatcgaactttgtagattatgtcaagatctattgccgctcaggaaagggtggaagagggtcttctcacttccgtcgtgagaaatacattccgaaaggaggtcccgacgggggcgatggagggagaggaggtcatgtgtatctccgtggtaaccggaattactggacgctccttcacttgaaatatgagcgtcatatcatggccaccaatggtgagagtggtagcgcgaagcgtagctcgggtaaagacggggaggatcgagtaatcgaggttccttgcggtacggttgtttacgatgctgagaccggagagtttatttgcgacgttacggaagacggtcagcaagtgatgttgctgaaaggcggtcgtggcggtctggggaattttaacttcaagacggctaccaatcaagcgccccgttattcgcaaccgggtgagccggcattggaacgtacggtgattcttcagttgaaattgctggccgatgtcggtttggtaggcttcccgaatgcgggtaaatctaccttgctttctgtcgtatccgccgctaaaccgaagatcgctaattatccttttactacgttggagcctaatttaggcatcgtgagttatcgcgataaccgttcgttcgtaatggccgatataccgggtattatcgaaggagcaagcgagggaaaaggtttgggacttcgtttcttacgtcatatcgaacgtaattcattgttattgttcatggttcccgctgaggcagacgatatcaagaaagaatacgagatattgcataatgagttagtgaagtataatccggaattgctggataaacgccgtgtactggcgatcaccaagagcgatatgctggatgaggaattgatcgaggctttgtcgcaagacttgccggagggaattccgtatgtctttatatcttctatcacgggactgggtattgtcgagttgaaagaccttttatggaaagagctgaataaggagaatttccatgaggcagagcgaattgtccataagaatatagatgtaagcacgttggaatttgaggacgacgacgaatacatcttccccgtggacgaggacgaggatgacccggatgaggaatacgaggaatactgggacgatgatgaagatgaagatacaagaaaataagcaaatagaggtgtcgcggttctccgggttaagcggataccgcgacatttctcattttacgacaacacgtcatggcggcgtgagtacgggaacgtacgcttcgatgaatccgggcgtttataccgaggatgatccgggcttcatccggaagaacttggaacttctttcgaatgcggtcgggatttccctagagaatatggttatacctcatcagacccatgaggatcgagtattggcgatcgacgcgtctttcctttcgctgaatgataaagagcgaaagctacgtttggaaggcgtggacgctttggtgacgaatgttccggatgtatgtgtagccgtatctacggcggattgtgtccctgtcttgttatatgcgccggatcgtaaagtggtagctgccgtccatgcgggttggcggggtacggttttacatatagctcgtaaggcggcaagcttgatgatcgaggcatacgattgcgatcccactcaattggttgccggaataggtccctctatcagtcaagcggcatttgaggtgggagaggaagtcgtaaaagcttttcaaatggcgggcttcccgatggagcggattcttcgacgtaatgcggagactcaaaaagcgtatatcgatctatgggaaaccaaccgtttacaattgttagaggcaggattgctctccgagcatatagagatcgctggcatctgtacttatattcggtatgaggattatttctccgctcgtcgcctcggtgtcaaaagcggccggattcttaccggaatatgcttgaaaaaatcttagttatattggctcaaacttataatagacatgatttcaatcactctttcatctgagatatcggaggcttgccccgatcttcacgtgttggctatcgcctgtcaagtaaagaacacggagcccgatgaacgactttgggaagaaataacccgtgttgaggaggatatccgttctacctgtaagatagaggatattaataagtggactcctattttcgctacccgtcaggcttataaacgtctggggaaagacccgaaccggtatcgcccttccgccgaggcgttaagacggcggatacttcgcgggcttcctttatataagatagataccttggtggatatcatcaatctggtttctattcgcagcggttattctatcggaggatttgacgcagataagattgtaggcggattggaactaggtgtcggaaaagagggggaaatttatcacggtatcggacgtggtgaattgaatatcgccggtcttccagtctacagggatggagtagcgggtgtcggaacgcctaccagcgatgaggaacgtaccaagattgaaatgtcgaccacttcattgttaatgattctgaatggttattccggtaaggagggcttattggaagcgggtggttactcggttgacttattaaaaagatatgtctcagcggtaaacgtggaagcggaactgatatgccgagaaaacagagggaaaataacgttataaccgtgttaatattgtttacaaagcgaaaaatgtccgtcttttatgctaaaaaacatctataatcttttgttttaatcatttaatctataaatttgtccccagtaatcaaatgttatcataaaatgattgaattaattggtacaaacgccggccttgtatggaacgttttaaatgaaggcggtaaaatgagttttaaggcagtgaagaaagccacgaagattaaagcggaaaaagatatgtacgccgcttttggttggttggcgaaagaaggtaaattagctttcgaggagattgaaggtgaaatgtatgtttctttagtgtaaacaagaggaacgtttacaagaattagggagggctgttcgatttttttggacggcctttttatttgtccatacgttttctgtcaaaataattaagtctacagttggttaattcaattcaaaaacttacttttgtgtagaatttggtgtgaaatgaccgaagatcataagagattgttagctgtatttgaggttagagttcgtgatttgatggcgttatgcgatcagcagaaacgtagaattgacgaacttacagctgctttgagccttaaaggcgaggagttgcggcaggcgaaggatatgattgaaggattgaatgccaaatgtgataacatgctgacggcgcgaattgtttccacgaacgaggaagagatgaagaacgcccggatgcggttatcaaaattagtgcgggaagtagacaagtgcatcgcacttttaaatgaatagaagcgatggacgaagaatttcttataaatatagtgatagccggaaagaaatatccgcttacgatcaaacgtcatgaggaagagttggcacgtgccgccgctgatcaaatcaacagcaagattcttcaatacaggcagcatttcgcggtcgaggtggatacgaaagatttgttagccatggtggcttttcaactctcgatgcataatctggagttggaaaaacggaatgatacaaatccttttacggataagatacaggagcttacaaccgagttggaaggatatctgaagaaataacatacatattgtaagaagagagtttccgcactgctttgcacggtgagaccgtgtgatggtagtgctttttttgtatataaataaatgaatcttaaattattagttaaatggttggaatgtatataatcataccgatagtaaccttcatcattggtgggttgcttgcgtggctgggcatgcgtttccttctgaagtcgaagtacgactccgtgcttcaagaggcggagaaggaggccgaggtgataaagaagaacaagatgctggaagtaaaggagaagtttcttcatttgaaagcggacttggaaaaacaggtatcacagcgtaacgctaagatccagtctgtcgagactaaattgaaacaaagagaactgacgatgaatcaacgtcaggaagagttacagcgtaggaataacgaggtagaggctgtaaaggagaatttatcttctcagttggagttggtggagaagaagaagcaagatttggataaacttcatcagaaggcagtggagcatttggaggctatctccgggttgtccgccgaggaagccaaagagcgtttgatcgagtccttaaaggatgaggcaaagacgcaagccgcttcttacatcaacgagatcgtcgaggaggcgaagatgaccgctaataaggaggcgaagaagatcgtgatccagtctatccaacgggtagcgacggagacggctatcgagaactctattaccgtgttccatattgaatcggacgagatcaaaggccgtatcatcggtcgtgagggacgtaatatccgtgctttggaggccgctaccggtattgagatcgtggtggatgatacgcctgaggctatcgttctttctggattcgacccggttcgtcgtgagatcgctcgtttggctttgcatcaattggtgcaggacggacgtatccatccggctcgtatcgaggaggtggtaacgaaggtgaagaagcaagtggaagacgaggtcgtagagactggtaagcgtaccgtgatcgatttgggtgtgcacggtttgcatccggaattgatccgtatgatcggtaagatgaagtatcgttcttcttatggacaaaacttgttgcaacatgctcgtgagacggccaacctttgtgccgtgatggcttccgagttgggcttgaacccgaagaaagcgaaacgtgccggattgttacatgatattggtaaagtgcccgatgatgagccggaattgccgcacgctatcttgggtatgaagctttgcgagaaatataaggagaaaccggatatttgcaacgccgtaggcgctcaccacgatgaggtggagatgcagacgctgttggctccgatcgtacaggtttgcgacgctatttcaggtgctcgtccgggagcacgtcgtgagatcgtagaggcttatatcaagcgtttgaatgatttggaacaattggctttatcgtatccgggtgtcgtcaagacttacgctatccaagcgggtagagagttgcgcgtcatcgttggcgctgataagattgacgataaggacaccgagaacttgtccgctgagatcgctaagaagattcaggatgagatgacttatccgggacaggttaagatcacggtgatccgtgagactcgtgcggtaagctacgctaagtaagaatattattaatataaataaaaaaggccggcttgtgtaagtcggccttttttatatctgtcgttatcgatttcccagatcgtcgtataaagtttgtaataggacttttcctttctccaagcgggtctcgtttccgctttcaggttcttctactaaaatcttgttcccttcattgtcgtatacggaaacaccggattcgtctataaagccaaatccattattgaatgtataaaaggcgtaatgcgggacgcaaggattcaatatatctttgctgaatgagaactcatctgtggggagacccatctgatttaataaggtggctgccaaatcggtctggtttgcgtacgtatcgatcactttaggttcagcgatcgctccacctagccatagcataggtatgtggaaacgcaaaggtccgtactcctgcatgttttcagggtaacggtatccgtggtcggagacaaagatgactaccgtatttttccatgccggcagttccttgaacgtatcaatgaaattgccgatacagctgtccgtaaatgcgacggagtttagatagggatgctccaaatggtgaaacgggacctcgaaaggctcatggctacttaatgttaggaatgtacttaaccaaggtttgccgtcgactggtctttgcttgatatcctcgtaaagatgcgagaacgtgatatcgtcgtttgctccccatttactcagacggctactcaagggaaaatcacggtctgccgttatcttgctgtagccggaactatagaaataactttgcatattcgtgaaattgatatcacctccatagagcatatctgccgtatatccttctttgttaagactctttgcgatagatggaagggtctggcttttcaccggatacttcatgatggaggtggtgggttgggctaaatagccgttcaatacggagactaagcctcgatcggtacggaacgagttggcatataggttcgtgaataatacaccctctttgctcagccgattcaagttcggcgtaattcccggctcaccgccaacagcctcgatagcatttgccgtgaaactctccatgatgataatgagaatattgggacgagtcgttgtcaatagcttgacaggctctgtaggtatggaatctcccgggcataaggagtcttgggcttgaatgagcgtatcgaataaggctttccgcttttcctccgggtagaaatcgaattgcgaggcaaaatcctgttgcttactcaatgaggctatcagactgaaacacgggttgatcgccgaatgattcaagaactggttctggctgaaataaaccatgccgacatttgccgtagacgtagttacgcctccccggattggaataaacaatattccccctgctaagaggatggcgaaagtacttcccaattgttccaatcccgtaggtggaaagctaggctttactggcgcgaaccggaggatgaaggtgaaccaagcatagatacctagcgcatatgccacgaataccaataattggataaagaacattcccaacggaacactcgccatcgcatcggcgggcgattggaggtagaagaataaagtagcgtccaacctgaatccccaaaagctgtataaagccacatctacggagaagattgccgataccagaattcccatgatcaagaagtaccctttcaataccttcttcaaccaagcgtccggaagccaaactgatactagagtcaataggagagggatggcggtaaggtatcccgctatcgtgcaatccagcttcagcccatgaagcataacctgtaggaagtccgtgaaggtacaagtctcggacaacgcatgctgataaaacataaataccggtttttgaataacaaaaaccggtagccatgcgataaaaacgattagtatgaataataatctttttttcatttcgaatataacttttcccgtaactccgcgatagccggatctgtgatgtaatcatcgtaatccatcatcttatcgatgataccgttaggagtcagctcgatgatacggttcgatacagtctgtatgaactcgtggtcatgactggagaacaggatatttcccttgaatgtcttcaacgtattattgaaggcttggatggattccaagtccaagtggttggtcggagtatccaagatcaagcagttggcgtcggtgagcatcatacgtgagatcatacaacgcatcttctcacctccggaaagtacgcttacctttttcataagctcctcgcccgagaacaacatacgtccgaggaagcctttcaagaatacctcgttagtatccggcgagaactggcataaccaatcgagcaggttgatatctgtattgaaatatttggagttatcgagaggaagataagaggtcgtgatcgtctgtccccactgatacgtaccggcatccgctttctcctcaccgttgatgatctggaacaaggcggtcatggcacgagggtcgtgactgataaatacgatcttgtcatccttctccacgaagaagttcaagtccttgaacaatacctgtccgtcgatactcttcgacaatcctttcacctcaaggatctggttgcccggttcgcggttaggcgtgaacaagattcccggatagcggcgtgaggacggtttgatctcctcgatattcagcttctccaacatcttcttgcgactggtggtctgcttggacttcgctacgttggcgctgaaacggcggataaattcttccaactctttcttcttctcctcggctttcttattctggttctgctgttgacgaagggctaactggctagactcgtaccagaagctatagtttccggcgaataattgtaatttaccaaagtcgatatccacggtatgcgtacaaacggagtcgaggaagtgacggtcgtggctaacaaccaatacggtatgctcgaaattagagagataattctccaaccaagaaaccgtctcaaggtccaagtcgttcgtcggctcatccaataataggttatcgggctgtccgaacaaggcacgggccaataagacacgtactttctgcttaccgctcaagtccttcatatacatataatgcaaatcctccttgatgcctagtccgctcaataggttggcggcgtcgctctctgcgttccagccttccatctctgcgaatttctcttccagttccgatacgcggataccgtcggcgtcgctgaaatcaggtttctcgtaaagggcgtttttctcgctcatcacctcccataaggtcgtgtgccccatcaatacggtatccattaccgtatattcatcgaacgcgaagtgatcttggctcaatacggaaaggcgttcgcccggtcctaggttaacgctacctctggtagggtctaattgcttgctgattacacggagaaacgtagattttccggccccgttagcaccgataataccgtagcaattgcccggtgtaaacttcatgttcacatcctgaaaaaggatgcgttttccaaactgtacgtccagattgttaactgttatcatatttcgtatacctattaaattgcgattgaggatgcaaaggtacgaaaaatattgtttatcttatcattggatgtcatacatcccgctcgttctctcccttttttaggctaattatcttttgggcgttgagcggtgagataacgcttttcccggttttggcttccagctctaatcgggcgttacgagccacctcgcctccttgttgggcgacatttatgtgctcgctaaaggtgtctggttccgatgcttctgatatttccttggtagataactcggccagcatgtttaatacaagctctttgtttgtcatattatctcgaagattctcttttcttaatcctttgaatcgtttatattccttggaggtcatgtcggaccatgacttatagattatgtcggttaatgtagcgaaatggaggccttcttccagtcctctcttcttccattcgtctgttagatctttccgtatctcgatggatttcaatcgttggttgatccaattatccgaatagcccaatcgtttataatcggccatggcttgctcgatagacaattccgggtcttgcatttgatccaaacgttccttcgctacttgggcgatccataacttaaaaggttctgcttttggagatggtactgattggataaggcggaagagttgctcggtattggctacgtcggttaaatatttcttgccatcagcggcctgcattttcagttgactacaatttgtagtcaactcgctaccttctcttttcattctggtttttaatacactccagtattttcgagggttggggctatctgttaaaatagatataacatcaacgatcgagaaataccattcctcttgttcgtcatcccatatggcgcgaacttttctttcttcgaataagcggatagattctttttgtgtcatttgtagttgctttgagtagttatagacaaaggtaaatgagaatttagtatatccatagtttaatagtttgattaaaagtttatttatcgcaaagtaagtatattaatctcatttaagcaaacgatacgcggtttaaatgagaaggtacgaaaaatattgcttatctttgcattatacattaatatccaatagtgtaatgaataaacaatctgtcatatctcttcttcggaaagcaaagcagcctttgtcgcagagttgcggtgtaaagcagttggggctttttggctctactgttcgtgagagtaatacggaaagtagtgatgtggatatattgatcgactttgaggatgataaagagacttattccaatttccttttggcttgtgagatattagagaagctttttgacagattgaaagtggatatagtcacgcttaaagggttaagcccttttattggccagcagatattaaaggaggtagagtatgtgtaagacccctatcgcttatttgctgcatatattggaggaatgtaactacatcctttcattcaatggaaacatatggctggaatgagagatcggttgattcatgactatatgggtgttaattatctgattgtttgggatgtggcaaagaatattattccaaaattgcaacctcaaatagaagcggtgatagagaaagaacagagtcgttgagagagttgtcttgatccattcgcatatcaccgacggaatttcgtggtcgatatgcgtctgttgctgatgccttcggtagggctttatgcgattttggctgtgtgcgacctctgttttatgggagaaccatggtgccgatacctgcataacgtggggattatcgtggggtgcgtgtgctttatcagcctcacggcgacctgtttggagcgagggctttgtcgggtaagcggttttctggcggggagcagcttctttgtttatgcttatcatgggatgccgttggcgttggctatcaaggtggtggttcggtatctccctccggggtctgagttagaggtgataggcttgtatttgggatctgcctgtgtggtgatagggatcggactcgctttgtatggcgggatgaggcggtgtgtcccttcctttttattgctgattactggtggacgatagttctcatcactaaaatggcttgtctgcgtaattcgcttattcgtggctttttgcttggaatgggcgcttttcgctgacaagccattcctttgaatagactgaaatagcgggaatagaggggagaaaagagaggatttggttgtcttttcatgctgcggataggcattgtaaggttgttacgatccagttgtagggtgtttacggcggcgttgttagttgctttcgactacgaatgctattgttttcgagtgaaaagtctattgttttcgaataagaagtctattgtttgtatgtttgagggtgataagagacgggaatcctcgctagaataaaagctccaaaaacgatatatccttggaagataactaattgcggatttttattctcaaatttggaagccgactgtactctggggcgaaatattcgattctctggagctttagaatacaaaatgtcagaatgtcaaattgggcgatcttctattattaacaaaggaaatctcattatcttagggcaatgtcatatgttgtagagacggggcgtgccccgtctcccgtatcatgtgcgatggattcatgtttctttggctatggatgaaatttggtatggttgccttgtttttatctgaataataaggctggattggaaataaatatctacttttgtgctctaaaacattaaagtaaacgaaaatagaaagatggctgcaacgaaacgaatgaaacgtgccttggtctctgtgtttcacaaagacgggctggacgaaatcctaaagaaattgcatagcgagggtgtgagctttgtatcaacaggtggtactcaatcatttatcgagtcattgggtttgccttgtgatgcggtagaggacttgacttcttatccgtctattttgggcggtcgtgtgaagacgcttcatccgaaggtgttcggtggtatcttggctcgccgcgagaacgagaatgaccagaaacaattagccgaatatgagatcccggagatcgacttggttatcgttgacctatatcctttcgaggagactgtcgcttccggcgctgaggaacaagcgattattgagaaaatagatataggcggtatctctttgatacgtgccgccgcgaagaacttcaaggatgtggtaatcgtagcttccaaggctcaataccagccgttgatggatcttttgaacgagaagggcgctgagacaagcatcgaggatcgtagatggttcgccaaagaggcgttcgccgtttcctcgggttacgactccgctatcttcaattattttgatggccgcgaaggttcccatttccgtgcaacggtagatagtccgatgcatttgcgttatggcgagaatcctcatcaagccgctaagttctatggtaagtttaacgatatgttcgatcaaatccatggaaaagagatttcttacaacaacttattggatatcgacgctgccgtgaacttgatcgatgagttcgacgagctgacgttcgctatcttaaaacataataacgcttgcggtatcgcttcccgcggtaatgtggttgaggcttggaaagaggctttggccggtgacccagtttccgctttcggtggcatcttgatcacgaatactacgattaacaaggaagtggccgaggagatccataagatcttcttcgaggtgattatcgccccggcttacgacgctgacgcattggaggtacttcaacagaagaagaaccgtatcatcttgatccgtaaggattgcaagacttgcccgatgcagttccgttctttattgaatggtgtcttgatgcaggagaaggacttgagcatccaaggtaaggctgatttggagcctatgacggataagcagccgacagcctcggaggttgaggacctgttgttcgccaacaaaatagtgaagaacagcaagtccaacgcgatcaccttggtgaagaacaagcagctttgcgccagcggtatcgggcagacctctcgtgtggactctttgagacaagccatagagaaggctaaatcattcggcttcgacttgaatggcgccgtgatggcttccgacgctttcttcccgttccccgattgcgttgagatcgcagaccaagcaggtatcacggccgtaatccagccgggaggctctatcaatgataagttgtctgtcgagtactgtaaccaacatggtttggctatggtgaagacaggtgttcgtcattttaaacattaataataagactaatgggattgttttctttcacacaagaagttgccatagatttgggtaccgctaataccattatcacgtgtaatgataagatggtggtagacgaaccttcggtgattgctttggatgctcgctcggacaaggtgctggctgtcggtaaggtggcccgtgagatgtacgagaagacgcacccgaatattcgtaccgtacgaccgcttcgtgagggagttatcgcggatttttacgctgccgagcaaatgattcgcggctttatcaagatggcgagcggaaggaagcgctggttcgctccgtccttacgtatggtgatcggtatcccttcaggtagtacggaggtagagatacgtgccgtgcgagactctgccgagcatgccggtggacgtgatgtgtacatggtttttgagccgatggctgccgctatcggtgtcggtatagatgtcttggcccccgagggtaatatgatcgtggatataggcggtggtactaccgagatcgctgtcatctccttaggtggtatcgtgtcgaataaatcaatccgtatggcgggtgacgatttaacggctgatatcgtggagtatatgcgtcgccaacacaacgtgaaggtgagtgagcgtatggccgagcgtatcaagatcaacgtgggttccgcgcttacggtattggaagacgctccggaggattacgtggttcacggcccgaatcagatgactgccttacctatggaggtacccgtctcttatcaggagatcgcccactgtttggataagtctatctcgaagatcgaggcggctatcttgagtgccttggagcaaacccctcccgagttatatgccgatatcgtgaaaaatggtatctatttggctggcggtggtgctatgcttcgcggtttggataagcgcttgcgggataagatgaatatccagttccatatcgccgaggatccgttgcatgccgtggcgaaaggtacgggagtcgctttgaagaatattgagaagtttaatttcttaatccgataagagtaaataattgagaattgagaattgaaagttgaaaattagcgagccgataggtctggttcttttcaattttcaattctcaactttcagttttcaattcctatgcgtaagttactagaattcctgatcgggaagaggcattggtttttgttcattctgcttgaggctgtttcgttgatgttggtctatcgtaataacgcgtaccaacggaatattatattcagctcagcgaatgtcgtgacaggatatatcgcctcgatatccggatctgtcacttcttatttgaatcttcgggatatcaataaggagttattggagcgtaacggacagttggaattgcaaatgctggatctgcaagatcagttagatgcgctgattgcggatacggttagttttaagggatttgcgccggattcgacggaacaatttccttattcgtttgtcgtggcggatgtagtgaacaacagtgtcacgcatttgtctaattatattaccgtggataaagggaagctggacgggatcatgcccgatatgggagttgtctcggaacgaggtgtggtgggtatcgtatcgacggtttccgatcatttctccgtgatcattccgttgctgaatcctaagttccggttgagttgtaaggtattaggtagtagttatttcgggtcattaagctggaatggacgcaatacgctgtacgccaacctcgatgagttgccgcgccatgtggagttccagaaaggcgatacgatcgtgacgagcggttactccgccgtattcccctcgggtattatcgtaggtacggtcgctgatttcgagaaacaacacgatgataatttctattcattacaggtcgagctggctacggattttcaagcgttgaacaacgtgcgtattatcaagaatttccgtcagacggagcaaattggtgtagaacaagaggcgaaaagaaatgattaataatttactgcgtggtttcatatatttcgtggtgtttgtgttgattcaggtcttgatcttgaacaacattcatttcttgcggatcgctaccccgtttctgtatctctatttcattattaagatgccggtcggtagctcacggacgcaagtcgttttcttctctttcatagccggggtggttatcgatacgttcagcaacacaccgggtatgcatgcggccgcctgtacattggcgggattttgcagggagcccttaatccgtgtattcatggggaaagatttgccggaaggtatttacccgtcttataagacctttggtttcggaggctttttccgatatgtgttatcgtttgtgttgatacaacatacgactcttttcgtgattgagtcgttgactttatttgacccgttgtttctggttgtccgtatcctctcgagcgtggtgatgacaaccttattgatttgtacggtagaagcattcaatatagagtctcagaaaagtggagaataataccaagtatgagtttgagaacaggcgctatgtcttaggtggggcggtgatcctgttggttatcatctttattatccgtttgttcatccttcaggtggtcgacaacgattataaagcttgggcggatagtaatgctttcttgaaaaagaccttatatccttcccgaggcatgatgtacgaccgtaatggtaaattattggtctataaccagcccgcttacgacgtgatgcttatcatgcgtgagatacagcctttcgataccctcgatttctgcgatgtgctgggcatcacgaaagagcaattcctcaaacgtatagcggatattaagaaccggcggttaaatcccggttattcttcctatgtccctcaagtatttatgaaccagctttccgcgcaggaatatggcgtgttgcaggagaagttatacaaatttcccggcttctatatacagaatcgcacgatccgccaatacgagtatcccaatgccgctcttgtgctgggaaatatcggcgaggtaaaccggaaagatatagagagtgactcttattatacacaaggcgattactccggcaggaccgggatcgaacaatcgtacgaggaatatttgcggggcgtgaagggtgtcgagatcctgttgcgtgacgctcacggacgtatcaaggggcgatacgaggaaggcctgcacgatatccagccggaatccggcaaaaacttgaaattatccttggatatggacttgcaggcttatggggagaagttaatgcagaataaattagggggtatcgtgatgatagagccggagacaggggaggtgctttgtatggtttccgcccctacgtatgatccgagtatcttgatcgggcgccagcggggaaagaactacgtggctttgcagaaggacccgttgaaacctctgttcaaccgtccgctcatggcgcaatatcctcccggatctacttttaaaccgacccaaggtttgatcttcttgcaagaaggtgtgattaccccggaaactcaatatacctgtgcgcatggatacaccttccggggtggtaagccggcttgccacgggcatccgtctcctctgaatctggtcggggcgttggcgacctcttgtaactcttttttcccttggggactgcatgatatgatcgacagccggaagcgatatccctcggtacaggaggcttttgaggtttggaagaatcacatggtctcaatgggatatggctataagttgggaattgatcttccgggagagaagcgagggttcattccgaatagtaagttctacgataaggtgtaccggggacgttggaattccagtacggttatctcgatcgctatcggtcagggtgagatattggctacgcctttgcaaatctgtaatttggcggctactgtcgctaatcggggatattatattactccgcatgtcgtaaaagagattcaagacactccgctggatacattatatagtaagaggcattatacatcggtggatacgcattattatagttatattgccgagggtatgcgaggggctgttacgggaaccgcttatggtggaacctgtcgtggggcggctttaccggatattgaggtttgtggaaagacgggaacgtcggagaatccgcatggtaaggaccattctatttttatgggattcgctccttatcaaaagccgaaggtcgccattgccgtgtttgtggaaaacgccggattcggtgctacctatgcggtgcctatcggtaaattgatgttggagaaatatttgaaaggagaaatatccgaggctaacaaggcgacggaggaatatattatgaatgccgtaatactaccgaacaatgcgctataggaaaacggaaatatggaagtcggtagactggattaccattttgttgtatttgattatggtaatcgccggttggtttagtatttgtggggcgagctacgagtttgataacgttggcttgttcgacccgtcgggccgtccggggatgcagatgatttggatcggtacctcactcgcccttattttcgtcatattgatgctggaaagtgacttcttcgatatattcgcctatctgatctatgcgtgcgtgatcgtattgttgatcgccactatatttttagcacctaatatcaagggatcgcattcttggctcgtattgggacctatccgtttgcaaccagcggagttggctaagttcgctaccgctttggccgtggcgaagtttatgaatggctatggctttaagctaacgacggtcaagaatttctcaatcactttgttcttgatcttcttgccgatggtttgtattcttttacagaaagagacggggtcggcattggtttacttggcattctttctgatgttataccgggaaggaatgactggatatattttgttgataggagtttgtgcggtcgtctttttcgttacgggaatgaaatattcagaggtgatggtgggtattaccccattgggtgaattaatcgtctcttgccttgtcttattaataaccatgggattagttgggagtgtccgtaaggattatataagcgttaagatcatgcttgggggaattgcttcgacattcttgatcgggtatgtcgtttctttgtttgtcccggtaaacttcgcttggatatcgataggcttggtaggagccgcgtcaatctatttattctatttatccattcgaaactgggtatggcattatgcgttaatcgctctgttcgctttaggttctatcggtttcctgttttctgtggattatgtgtttaatgacatattggaacctcaccaacaaattcgtattaaagtctctttaggcttggaggatgatcctagcggggcggggtataatgtgaatcaatccaagatcgctatcggttccggaggattatccggaaaaggattcttgaatgggacgcagaccaaattgaagtatgtgccggaacaggatacggattttatcttttgtacggtaggcgaggagcaaggctttttgggagcctctgccgtattgatcgtatttggactttttattcttcgtctgattgtattggcggagcggcaagataatgctttcgggcgagtctatggctatagcgtagcctccatattctttttccatctggcgattaatgtcggcatggtgacgggattgactccggttatcggcattcccttgcctttctttagctatggaggttcctcgctctggggatttacgatcttattgtttatttttcttcgtttggacgcttcccggaaggagcgttagtggaagaaggtaagacccgtaagccgatttcctgaatgcccggaagttggtcgttacgcatcccctgccggaagctaaaggtatattgccctttaacggggaaatagtaagcagaccgtatcgggaaactggattgaaacagggagatcccgtccccataccatttcccaaactcatcagctaacatacattcgatcgtatccctttttaaaggacctatcggaagttcctcgctgcaaaatacccataggttctgatacggatacatattattgttccgtacttccaaggttaggtcgtacggaaccgatatatcctcaatcaagaaagtgaaatagtactccttattcttctcccacgaggtgttctggatagcttgatactgatcgtatacagcttcattctcgcaagagaagcataagaagcatgttacacaggcggcaatgaactttttaagcctcaggctttgtctctggcctattctccgttttatcaggtctggcctgtttgatcggttgctgaggtttgtcattattcgcaggcttgtcattgttggattgcttatcgttattagctctcggcctttgtttcgggcgattgtttcggttgctctccctgttattatcacggttgttctcccgattctcccgactgttttcccggctattatctttgttattctcccggttattctctctgtctcggttattctcccgattgctattcctattatttcctccgttgcggcgattattgccaccggctccgtttcctccgttgttcttattctcagaaacaggtgcgtcggtgttggtaactgccgtcgcagtggtgttagctccgttcccgtttccattgttctcgccattattcttgttggcaggacgttttttctttttctttttaacagagtcgaaacgtgtgacgctttcttgcccaagaatatcttgagcgtctcgtttcggtggttgtggcttcgtatccgcctctagagatatcggcttcatgcctttcttattcatgttaatgacatcgaaagcacggcttgccggaatcgtgataagattagccgcaaatgatttatccgtagaataggtaatttcccgtttgaaaatatccgtcttgaaatgatagtaattattatctttggtctccaagacaatttcccgggaaggaaggcgtttctgggcttccacatatgtatctacctcataattgatacaacatttcaatttagcgcattgtccggccaatttctggggattcatggaaatatcttgataacgggcagctccggtagcgaccgatacaaaacttgtcatccaactggaacagcaaagttctctaccgcaagggccgataccaccgatacgtccggcttcttgacgagcaccgatctgcttcatctcgatacgaacacgaaaagcctccgctagcactttaattagttgacggaaatctacacgttcatccgctatataataaaagatcgccttattaccgtcaccttgatactctacatcaccgattttcatattcaatcctaaatcggccgcgatttgccgcgagcgaatcatggtggcatgttcctttgcttttgcttcctcatatttctcgatatcggtcggttttgcctttcggtaaatccgtttaggctcggcttccgtgcgcacattgttcttcttcatttgcagcagaaccaatttacccgttaaagaaaccgtaccgatatcatgaccgggacttgcctctacggctactatatcacctttttccaaaggtattttagcactattcaagtaataccctttgcgggtatttttaaattgaacctctacgaaatcagtcgagccttccgcgtcgggtacatcgcacaaccaatcataggtattcagtttattgttttgccttttgctgcaacctttgcagcccatgtggctacttcctttatctaatatgaaatccatttatttttaatttgtaagagggccatcgacataaccacccaatttatctaaatatgcaaaaatagtgatttattcccattcaaaatcatagttatgattttttcagttataaaaaaagacccgaagataggtgttatacctaaccttcgggccttttcttatatatttacacgattagtctaccaacccatggctcttgaataccttgtggattgtctccaaagcgtaatctagttgctctttcgtgtgggtagccataagggagaagcggatcagtgtatcctcggaagcaactgcgggagctactaccgggtttacgaagattccggcctcaaataattcttttacgataaggaatgtcaagtcgttgtcacggataaacaacgggatgatcggggtagaagtatgtccgatctcacaacccatgttacggaaaccatccaatgcgtaatgagtcaaatcccataaatgttggatacgttccggttcgcttaacataatatctaatgccgcgttcgctgcggcagtagcggcaggcgtattgcttgcgctaaagatataggaacgggagtggtgacgtaagtaattgataaccggttcgtctgatgcgataaaaccaccgatagaagcgaaagacttactgaaagttcccatgatcaaatcaacatcgttcgtaacgccgaagtgattacaagtaccgcggccatgatcaccgaatacaccgataccatgagcctcgtcaaccattacacttgcgttatatttctttgcgagagctacgatttccggtaatttagcgacatcaccttccatgctgaagacaccgtcgataacgataagtttcaccttgtctggctcgcatttctggagttgtttctccaaggagtccatatcgttatgcttgaatttcaatttcgtggagaaagaaagacgatgtccttcgataatggatgcatgatccaactcatcccaaaggatatagtcctcacgtccggtgatacaggatacaacacctagattaacttggaaacctgtagagtatacgatggcgtcttctttaccaacaaattctgctaaacgtttttccaactggaggtgtaagtccaacgttccgtttaagaaacgtgagccggcacaacctgtaccatactttttaatggcctcgatcgctgcttcttttactttaggatgattggttaatcctaagtacgcattagaaccaaacatcaagactttcttcccgctgattagaacttccgtgtcctgatcgctctggatttccctgaagtaaggatagattcccattgccatggctctttgaggagcgtcgtactttgctagtttctcttgtaaaagtttcatattattataaaagagaatgatttatctcgctatttatttattctaataaagaacacaggttcgccgcgtacataatcctatgtttcggcaaatccagccgcaaaagtagtaaaaaaataacttatagtagtcgaaatgctttaaaagttttataaaagcattatttttgtcctctcaaataaaaaagaagaagtgaggatgagcgaacgggatataaaagtacaagctatcataaaccctatatcaggtgtagggtcgaagcgcaagatacctaagatgatcgaagggatctgctcgaaaaagaactgttcgttaaacatttcttttacagagtatgcaggccatgccagcgagttgactcggcaagccatagaggagggagctgaatatattttggcggtaggcggtgacgggacggtgaatgagatagcgagagctatgatccattcgaacgcgatcttaggtatcatcccgaaaggttcgggcaatggcttagctagagaattgcacataccgatggacgtgaaaagagctatcgatctgatcgcgaaagggcatgttacgacgatagattgctgccgggcgaacggacaggtctttttctgtacctgtggagtcggttttgatgccgccgtcagccagaaattcgcgaatgagaaacggcgcggctctcttacttatataaagaatacgatagaggagtatctgagctataagcctgagccttatgaattggtggtggataatcagacgatcaaggagaaggcgtttctagtcgcttgcgcgaatgcttcgcaatatggtaataatgcgtttatcgctccgcacgcgaatatacaggacggacggatggacgttacgatcttatccccttttatgccattggatatcgctcctttggccattcaattgtttaccaaacagattgatcggaatagtaagattaagacgatgaaagcccagcaagtcacgattattcgccaacatccgggcgtgatgcacttggatggagaaccgatcatggcagatcgccgtatcgatattacggtggaaccaaaagccttacatgtgctgactccggaggttgtgtctttcaccaaggaggtacataatttatttgacgaggtaactcgcttcttcgataaaaagcttccttacattttcaagtaaaagtctttagctatagcggtgaattcttcgctatatcgatgccgctcgatttctagggtcagatgagacgacttgggctttgctaccggcgtcgctgagagttctattaataaacgcttaggaggggcgtccggtatgggagaaacgtgggcttctctcgatggagacaaagactcttctcgagcgatgtctattaaagactcccgttgctcgaagggaagcaccaaggcgatatttccttcgggtgccaacagtttgcggctatcacgcaataaatccgggagagatagagtatccgtatgccgggctagattacgtttagtatccgggcatttcaatgaatcaataaaatagggtgggttggatacgatcaagtcatatttgatattctcatccggcatatattcggagagcgaggtttgatagacttgtatccggttggcgaaaggcgattttgcgatgttttcccgagcttgtaaacatgcgtctaaatctatatcgatagcgtctaggattgcggtgctacgctgcgccagcatgagggcgatcagtccggttccggttcccacatccaaaatcctctgacatctctctgtgctagcccatgccccaagcaaaacgccatccgttccgactttcatggcacatttatcgtgccataccgtaaatttcttgaattgaaaataaggatttgccatatctctatcgattgtatgccgcgaaattagtaagaattgaatgaaaagctgtaactttggcacgtttattgtattaacatatacaatgatgaatgtatatatgaaagaaaagacgagagtattttgccagaattcgtttgatgacttggatgacaatattggtatcgtaatgccaattcttacagaatgcgatgtagatgaggatttcacagaaggaatagagaaagttggagacactatacccattcttccgttaaggaatatggtactctttccgggtgttgccttgccggtgattatcgggcgtcctaaatcgatgcgcctgattaaagaggctgtacataaaaagagtttgatcggagttgtttgccagaaagagatgggtacggaagatcctatcttagaggatttatatacaaccggggtaatcgctgacatcgttcgtgtcttagagatgccggacggtagtactactgttattcttcaaggtaagaaacgctttgaattgaatgagttgaccgagacagatccgtatctttccggtaagatcaccgtgttggaggacacgaagccggacaagacagaccgcgagttcgaggctttgatctcaacgatcaaggatttgaccatcaagatgcttggggccgtggctgaacctccccgggatttgatcttctcgatcaagaataataagaatgtcttgtatgtggtcaatttctcttgtagcaatataccgagtggatcggccgagaaacagcaattgttattgatcggggacttaaaagagcgtgcgtatcggttactttttatcttgaaccgcgagtatcagctggtggagttgaaagcttccatccagatgaagacacatgaggatatcaatcaacaacaaaaagaatatttccttcaacagcaaatcaagacgattcaagaggaattgggcgggaatatcaatgagttggagataaaagaattacgggagaaagccagtcgtaagaaatggcctgccgaggtagcgcaggtctttgagaaggaattgcgaaaattggaacgattgcatccgcaatctccggattattccgtacagacgcaatatgtccagaatatcgttaacttgccgtggaacgagtatagtaaggacaatttcaacttgtctcatgcccagaaggtcttagatcgtgatcattatggtttggagaaggtgaaagagcgtattatcgagcatctggcggtattgaagctgaaaggggatatgaaatctccgattatctgtttgtacggtcctccgggagtcggcaagacttcattggggcgttccatcgcagaggctttgcgccgtaaatatgtacgtgtctctttaggtggattgcatgatgaggccgagattcgcggacatcgtcgtacctatatcggtgctatgtgcggacgtatcatccagaatatacagaaggcgggaacatcgaaccctgtctttatcttagatgagatcgataagatcacgaatgatttcaagggggatccggcatccgctttattggaggtcttggacccggagcagaataacgcgtttcacgataattatctggatatcgattacgatttaagcaaggtgatgtttatcgctaccgctaataatttgaatacgatttcccagccattgctggatcgtatggaactgatcgaggtgagcggttatatcatggaggagaaggtagagatcgcagcgaagcatctcgtgcctaagcagatggatgtacacggcttgaagaaaggttccgtgaaattccccaagaaaaccttacaagtgatcgttgaagcctatacacgcgagagcggtgtccgggaattggataagaaaatcgccaaaatcatgcgtaagctagcccgtaaggtcgctagcgacgagcctatcccgacgagcattaagccggaggatttgtatgaatatctaggggcggtcgaatattcccgcgataaatatcaagggaatgactatgccggcgtggttacgggattagcttggacggctgttggtggtgagattcttttcgtggagtcgagcttaagtaaaggtaaggggtcaaagcttactttgaccgggaatctgggagatgtgatgaaagagtctgccatgttggcacttgagtatatccatgcgcatgcggctcagtttaatatcaacgaggagttgttcgagaactggaatgtgcatgtccacgtaccggagggggcgatcccgaaagacggaccgagtgccggaataacgatggtgacttctcttgtctccgcctttactcagcgtaaggtgaaaaagaacttggctatgaccggcgagatcacgttgcgtggcaaagtgcttcccgtaggtggtatcaaggagaagatcttggcggctaaacgtgccgggatcaaggagttgattctttgcaaggagaatgagaaggatatcaatgagattaaaccggagtatttgaaaggcttggtgttccattatgtgagtgacattcaacaggtggtggatctggcgttgctgagagaaaaggtggataatcccttgttctgataacgactttttaggcatatataggtgtgggcttatacgtatatacgtgtaggcccatattagtatcggcgtaagcctatacgtatatacgcgtgggcctacgccgatataggtgtttttaagggaagcgtatacttctatttagagtatttccgtaggaattccaagctgttgcgtatctcttggatatcggatttgaaatcatcgtattcaatggagataagcccgttgaaatgctgacgcttcagctcgttgacgaacgcttttaccggtaagatcccggttccccatgtggcgtcttccatcttgtcggtgaggtctttcaaatgcgccaccttgatgcgtccggataatttctggagattcttgagcggatcttcacccacccgtttccaatggccgatatcggcgcatactcccatcaagggagaacggcctttcagcgctttctctaccacctcggcacttgcgtaaatgcatggactcggatggttatggatcgctacctccatatcgtacttcttggcgagggattcgatgtagtccaactggtttaactccggttcgacagtcacgatatgtgcgcctattttatgagcgaatgcgaagaacttatcccattcctcgttagtcccataagaggctacaccaaaggcgatcggcttgattccccttatcttgaactcgtggcgtaataaagcgcagtcatcatcgctcaagtcgtaattcagataggtctcttttgggaacggagcgcccaattcttggaaaaagaaagcttccgcataccccatgcccagttgttgggtcttatccaaggtctccatcaacgtaagattgtggaaagtccaagtctgtatacccaccttccagtccgctttttgcgccgccagctgtacggcctgcccaaggagcatgaccgtacatagtgctaatataatatatcgtttcatacttataccggcatttccggaaggctccagccttcacgataggtatgtctgatatattcgttggcagcctctagcgcattgaactccgcgtatttcgtatcgaaataggggtgaccgtctatcaccttgaaatcatcgctggttacgatcttcaatacgtcggaagaggatatgttggtgaaacgcatgttttgggcgtcccacatcaatttcttgttcaagccttgcagacggatcgccaatacgcctaataacaccatctcgttgaatggtccggaataagcgaagttggaagttccttccacacggttctccggcgattccttacaagcacggatccagtcttgctcatggaaaccgtcgaagtatccggtagcgttcgggatacggcgcaaatatggggctacttgaggtacacggccggataataaccgggagttgaaacctccgcaatcgcagatcaacgtgtctttagtacctacgaagatacatccacccaaaccgtcacgcatcatatctacaccatccggtaataagtccggacgctgaggaagcataccgccatcgtaccaatatactttcacttccggcaaggctacctttggaagattgtcacgagccgggaagcggaattctaccacctccgattgaggagcggattccgtattgatctgggtagaacggccttgtacgcgatccggataacctaacttcaaggattgataaaccgggtcgagcacgtggcaagccatatctccgaaagctccggttccgaaatcccaccatccacgccagttccaaggggtatagatctcatggaacggacgcatggcggccgggccgataaataagtcccaattcatcgtcttcggacaacgttgtttttcggttgggcgctgtaatccttgcggccagatcggacggttggtccatgcgtgtacttcttttacttcaccgatctctccgttccagatccattcgcataattgacgtacaccatcgccggagttcccttggttacccatctgggtcgctaccttatatttagcggcgagttttgtcaataaacggctctcgtaaacggagtgggtaagcggcttttggcaatatacgtgcttccccattgtcaaggccgtggccgcgatcgtggcatgagtatggtccggagtagctaccatgacaccgtcgatctggtcgcccaactcatcgaacatctttcgccagtcccaataacgtttagcgtccgggaattcctcgaagcagttcttcgcatatttccagtcgatatcgcaaagcccgatgatgttctcggttttcatgccgaccaagttcgggtggcctttaccaccgataccgataccgacaatattcattgtatcacttggtgccttatggcctaatccagcgatcgttttagaggggacgattgttagaccagctgccgctacggctgcttttttcagaaaatctcttcttgattccatgttgtataatttgttttttagtagttactgttagaaattgaaacaggaggttaccattctatgatccgaagggtaaggggagactaccacgtccgaggtggcctcgctttcgcctgtgataaatgagtctgttaccttacatccggaatatagtacgaaatccagacggtctagtatttcttgttcgctaggaacgggagtccatgtatagccgggtgtggagacctcgtccggatggattgtccggtaggagtcattcatcccgatctcagagaaagccttggttgccggccattccaccttgatcttgtggataccggcatcggcagcccgttgtgtccagtccaagaaagaaggctcattaaaatctcctgttaaaaagacaggataaccttctttcatgacttgctgtatatccttttgataacgagttacttcttcacgccgggcctcgttggcgaaccggacagcttcttcctcggtatcgataaacggataatcgccataaggaatcccattcaattgataaggttgatacggaatataatatagatggcaattaaacatccagcagaatttgtctttgcctacttgtatcttcaccccgtagcgggaagccgtactgtcgacgaccggataacgagataagatataatgtccctccccttggttgaaaaggtggaaacctagggattccgcgatttccggtacatgatcgtgcttgatgccgtcttcttcatagatatgcccttcttggattcctacgatatccgtctggctagcctcgatcactttcgctgtctggctagggggaagctttccccctagggtattcaaccaaatattgaaactgctgacttttaccgttgccggcttgtcgctacatgcgctcaatgcacaacaaagtatggctacgcagcataaaatttcacttatcttcctcatgtttctctggtatttacaggaacaaatatattaaatgtcccgttcttttcactactaagacttcttaatttattttaccatcggccaaggaaacttcgatacaagctggatgcgttgacctgtagcttgtgattttcgggcggcctcgataatctctaatacgtgtaacgcatgctcgacatttatacgtggttccgtgtttaatgccatgtgtttgctgatatcggaagctccttcttgccaaacatagccattggtgtccggaacgaaacgttggggtaccggatgatccatcgtcgataagtccaccccgtttggtgcccagtcgtaacctaccatatgcatattgccgtgtgaaccgtataaggagatcgtcgctttctcctgtcctttacctaaatgtccgtatggatcgaaataattgaaaccacactcgatatgagaaaggactcccttttcgtgttccatgataatcatggcattatcttcttctcgaactttgattttgcccttatcgtctacggttctctccggggttacgattgtagtcatggcaacaacggatttagccggtcccaataatccggttagggtagcgatgttatagactcctaagtcgggcatactgccacctagcggttcgtaaaagaaagcagaccaagaagggccttcatgtccgtaatgtccgtgcgcacatgccagattacctagggttcctttattgatttgttcggccataaaggcaaattgaggactgtttacaacggcaggcgcaccccagatacgaagtcccttgctcgtagcgagatcgtataattctttgccttccttataggaattcgccaaaggtttctcgctccagacatttcttcccgccatcaaagccttacggttcaactctccgtgaacctgcatatcggtcaatgtaagcatcaagtcgaacttggaaccgctaagcatatcatcgatatgcttgtaccatttaggtatattatattgcttggccgctttttgagcacgatccggtttgatatcgcaacaagccacgatttctacatacgggcatttcgatatatggggaaaatattgggtagatacacttccgcaaccgataacggctactttcacctttttaccttccgactcgaatttctccgcataggcggaaagaggggatagtagtgacgctagacttgctgcggcagatactttaaagaattcttttctattcatggcattgatttcttaatacaattagtctaaatccttaatcttcacattcttgaaatatactttacttccatggtcctgaaaacaaagtttaccggtggtagagataccgtaatcggggaaagcttcccatttaccgctataacgacgcatcttccaatcttcggacccttcttggaaagagaaaagtttttctccgttcagccagtgctcaacatatccatccttgtaaagtaccatagaggagttccattctcccggagggttcacctgtttggtttccggtacatacatagcgtagttgcaacccgttttctgccagtcttccaatccctcttttccggtctcgctgacccaaggatagttatcgtcatcgatcaactggtattccgggccggtttcaaaaggagctttgtacttaggcccttcttgtacgtgatataagaatcctgagtttccttgcgccccgattttccaatcccatttgatctggaagttatggtaattcttaacggtaacgatatcggtacttaccttgatcgtggtatccgctatcacgtcaccaccgtttccgtagccgacgatcaccccgtcttctacctgccatcccttgacatcacccccgttgaacattttccaaccggtaaaatccttgccattgaataacaaggtgtagccttccgctttttcctcctcagtcaatacattatcttttacttccgtggatgaggaacgacttccacatgcaaccatacacatcccgtaaatggttactagaaaaatagatacgatctttttcatatattagaatatttagtttaattatctccttatgataacgccatttgatatggtttatttgttcattggcaaaaatactgcacataaaggatttggataatagagtatctagctaaaaaaaatggattatctttgcgttattcagtaaccatctaaaagttctggtttatggcgaaaataaagcatggtttttccggtcagcggttgattgtctatcctttctacgttatagaacaagcgttgaacaacccgttagtcgcggacttggtcgtacactctatggggtattttccgaaggcggaaagccattatattgatcgtgcgtccggttgtggagagtaccttttaatttattgcaccaaaggagagggttggtacgtgttggatggaaaacgatatgtcgtacccgagaatcattttttcatcctcccggcagagaagccccatcaatatggttcgagcgagcatgatccttggtatatttattgggcacattttaaagggaaaaaggcgaagtatatcagcgatcaactgcaaggggtgatcccgatcgacatggatgataattcccgtatcggcgatcgtatcgctttcttcgatgaactattgaacgtgttggagagcgggacggatgaggctacggttaattatgtcaatttaagtttcaatcatttgatcgcctctttcctctatgtgaagacgtatagggaggctaaattctccaaaagcaaggcggagaatacgttctttattagtttggcgacccacttcatgacggagaatctggaaaataaattgacattaaaggaattggcctctcatttcggctattcggaatcttatatgtacaggcttttcttcaaggaaaccggctatgcgccgatgaattatttcttacatatgaaaatagaccgggcttgccagctattattacatacaaatatgaaaatcaatcaggtcgccttgaaactgggctttgacgatccctactatttcagccgtatctttaagaagatagtaggtacatcgcccaaggattaccggcactcgttgccgaagtgagatatttacgatgaacctaaacgggagcttagggctggcggtatttattccggtcggcttccgttatttcccggattacacggcagggattgccggcggctatgacattggccggaatatctttggttacgacgcttcctccggcgattaccgtgttatcgccaatggtcaccccgggaaggatacaggcttgcgcaccgatccatacgttatcgccgatagtcacgggaaaagcgtattccagaccttcattacgttgctttacgtcaaaagggtggccggcggtatagatgcctacgttcggggcgatgaacgcgttattgccgatacgaactttcgctccatccaagataacgagattcacgttggcgaagaaattatccccaatctcgatattatagccataatcgcattggaaaggggataggataacggtgttcttccctttcttgcctagaaaagaggttaggatccgatctttttcttcctcttggtcggggggcaattggttgtatttgaaaaggacgcatttcgctcttttcatctcatcttgaagctcactatcatgattcgcattgtataatagaccttccgccgctttctctttttctgttttcatatgtctcttactaagatttataaaacgatgatttgcgcgaagatactattttattgggaggagtttatcctccgattcgtatttccaaacccattttttcccccatctccttaaaggggaacagctcttctttggctagcatttgctcgcagggataaggataggtgagacctaattgctcgtatttatcttttcccaatgtatgatagggaagcaggtgtacgcatttgatacgattttctttcgccagcatgaatatttcccgaagcgtattctcattgaaattgaaaccggggattaccggtacacggatcgttactttattagcgctcttactggatatataccgtaaattcgtgaggatcgtatccaagttcgctccggtttctttctgaagtaaatccttgtccgtatgtttgatatcgaacaagaacaaatcgataagcggaagcgcttgctttatcttatcaagattcacttgcccgcaagtctccacggaggtatgtagtttctcgttcttgcattggatcagcaaatccatcaatccctcgaattgcgtgaaagcttcgccaccggaaaacgtaacccctccaccggaattcaggtagtaatcccggtcacgtaaaaggatttccatgatctcggatgaggtaatagattcaccgacaaacttaatagcgttctgtgggcatatacgctcgcaagccttgcaggctacacaggcctgacgattaaataccggaaaatggtcttggatggagatatttccccgtgtacaaatcgcctcgcaacgtccgcatccgatacatttattcttgatatggagcaaatgcggtttccttttctgggattccggattggagcaccatggacaatgtaggggacaaccttgaaggaaaacgacggtccggatgcccgggccgtcgtgaacggcgaaccgttcgatctccatgattgataacctattctcgctaaccttatatttatttatcatacaataccctgcttaaaagttcctgttgaatattgggagataaatcgacgaataccgcggagaacccgcttacccggacgattaggtccgggtaattttccgggtgctctaccgcgtcttctaaaactcccttatctactacagtcaccatcaaatggcaaccccctttcgcaaaataagtcttgaacaggctcttgatgacagccctgttctcgttgaacatggaaggagaaaacttaatgttttgtaccgagcctccatgatacttggcgtcgaacttcgccaaggaattcagcatggccgtggggccgcttttattcgctcccccttgcggattattggcaggattcatatacatgcacgataatcgcccgtcgggtgaggcggcggtccggtttccccattccgtgtttaattgattattgctgataacgatcaagaagtattgcataccgatggcgataccgcgattgcgtacgcctttcgctacgaactcgtacaaatcgttggccatcgtatcggcagtctcaaggtcgttaccatatttatcacagtttaggcaatcttttcgtaaagcctcatagccgttaaaattagctagcatggcatcattcaattgccgtaacgtgtattttttttgattgaataccagatcccggattacccacagggaatcggaagtgttgatattgccatacgtctcgtttgtcccgcctagataacgtacgcctccgtccaaaagcgcttttccccgtgcgatgcaatcatcggtcaataggctggtaaacaagaaacttacgtgctggttcatcacctcatacgaatggtattgggctttgacagacagatccagataataatcgagtaaagccttgtaaccgtcatagaattcctcgaatgtctgatactcctctaatttctttagaggtaccggcccggatttacgtttaccgtcaatcgggtcgataccatcattcatataaatcgtaagtagttttagtaaattgatgcagatgttgggcgtacccgtactctgtccttgtatcacgaactcggtacaaccgaaaggcacgtattgttccgccgttttctcgtctacacgcattccgtacatgacggccgggacgtttacatcatcattgtaaagggtcgggtaagtagctcccgcacccaaagcgtccaacgcttcgtcccagatttcctcggaggtctctttatcgaagcgcaaagtgaattgcggctctacatatctgcaatttttcgctactttcatggcgatatgcaggaatacgtcggcctctttcgggtgcttgcgtcctttaccgcctacgatgatacgtccgtttacggtggtacggcgattctcaatcatggtccaaagcgagtggatatatcggtatgcctcttcgtcggtcaatcgcccggacttgagatcggctactaaataagggcctagataatcatccagacgaccgtagtttataacaccggccaacaaagcgaataaccagaataactgcatcgcttcatggaacgtaccgggtttcttctccttgatgttctctagggcttggcagatacgctctaattctttttgccttttctcgtcggctgaagccatttgatctctagcgtcttgctggagatgagaagcacaatctacaaaaatatccagacattggatgcctgctttgtaaaagttattatcgggttgctctttgagtttctccagtaaatcagagcgaaggccaccaatgcccttatccaatagtttcgggtaatccagcatcattccagatagacgtgcggtagcgatcatcgggtattcgcagtcgatgaacatacccaatgtatcctcggtgaggacctccttgttgaattgggtctttaaatcgtgatccaaccaataatcatataacgcatccacccgttttcgttcagtttcatccagttgttgctggaaggcacggagtttcttgaatacgcaataatgcccgacaccccctaatgaggttacgcatccgaacccgatgggtaggaagtccgtacgtccggcgatcaagtcttgatccgtgatcttgcgaaatagcgtggggtataaaactttcaggcattccacttcacgtatctctttgggtagggcggcacaggctttatggactgccgtataccgctccatgatctccagttgtacgatcagaggtttctcgcaaggtaatttcttgctgatctctacgttttgcgccccttctacattgaaatttgccatatgactattaatgtttgcttctttcggcttcccgccagttattttggtaaccggttagtaagtccgtaaaacgtttcgtgatcaagtgcggacgggtgatcgcgctacctactactacggagtgagctccgaggaagatacatttcatggcatcttccggcgagtagatatgcccctccataatgacgtaggccttgcccttgaagtcacggcacatacgggcgaactcccgtaaatccggttgctcgatatgtttggtagcttccgtatacccatataaggtagggccaacgatatcggctcccatttctacggcacgtacggcttcctcataattggatacgtcggcgaagatgatcgcttccggaatttcctttttcaagatcggtagcagttcgtatgccgggtggccttcatgggttatttggctcgtacagtccaaggcgataatctcggctccggcttcccatacggctttagcggcctctagggtgggagtgataaatacgtctgtatcatcgtgccagattttccaaagcccgattactggtaaatccacttcttttttaatcgccttgatctgctctgggtcgttggcacggatacccacggctcctccccattgggcggcttttgccatttttacgacaaagtctactgaaaaagtcggatcatcgtgttgtacttgacaggatacgatcagtcctcccttgaatgaatctaaaagttctttcttatttgttttcatattttttttcgttacatcgttttctctaaaagcgcggcgccgattattccggcgtcatttcctaattccgcacggatgacttgggggatacctatttcctcggcggcgaaggtacaagtatgtagtttctcgtttaaaggtttcaacagcaggtcacctgcatgtgcgataccaccccctaagatgattacttgcggacggaagatggttatgaacgtggagattccggcggccagtttactgatatagtcatcgacgatctgtttagcgagggaatccccttgtttagcggcctcgaaaaggatttctccattgactttattttcgtcttcgccgcaaagtttccatatcaaggtgtccttattctcttgtaaggcctctttcatgatgcggattaatgcggtagatgagcaataagcttccaaacagcctttttgcccgcatgtgcaacgttcgccattgtataccaatttggtatgtccaagctctgctcccatattatcggctccggaataaatcctcttacccatgataattccgcctccgactcccgttcctagcgttaacatgatggcatcggtatattggctggccgatccggccaagacctctccataggtcgcgcaattggcgtcgttggctatataagtaggcaatgagatatgcttctttaaatagtcgtagatggggacattcttccatccgaaacaattggcatgtaccaaaaggttcgtctttggatttacgtaactgggcatgccgatgccccaagaagagatgtcttccatttgcaagcctgctttgagaaccgcttttttgctgacttccgccatgtcggtggtgatctcctcgatcgtgcgtccggcttgtgtcggtatactctcctttgcgataatctggtgattctcatctactacgccagcgaccatattggtaccgccaacgtccagaccgagataatacttggtgctttccatctttgctctttattttatgaggtcaatagagtgaattatttgttggcaaagatagaggagttgtctgccctagacaatgtgaggtttagcctaaaataatggactatttttgcataagtgctctcgcaagcttacgagagtactttagagaagaggtgttatcgagaggagacttctgtaataaccttcaaatatagtgtgactgtgtttctttatgtttaaagaatcatatcgtaggtcgattctattatttttctcgatgatggagcaagcctcttttatcatgggcttgaagtcttcttctgttttatctttgtctccgttggctaggtagatatataattttttttctccttgataggtttccgtgaacactcgtaacctatcaatcatcatattttcgctgtatttatagttcggtgatatggctataatataaggaaataagtctgggtgttccatcatcgcataagtgacgaatgtccctcccaacgaatgtccgactaaaatcctgttatttcccgcatggtatttttcttggatgaaagggattatttcattcgttaatgacgagagcatttcttttccatgtcccgggttgtcatatctttttaccgataaggaatctgtgaaaggcggggtcagctcactttgcctgtttgaattaaatattccaacaataatacagggtatgttgggatgtgtcaactcgaatgttgaacaaaataaattgaatgtggggggatattgtgcgtctaagacataaatagcgagtaaagagtcacttttaaggctaccatctactccgcttaaatagacttgcatttcacgggtctcttcaaaatagtctgagttgtagatatatcgactccctaatgcctgcatcaagtagaaatcggcttgcgcatgtatccggcatattcctgagaataatacgataagaaagagaagaactgtttttgttttcataaatagtgatatctagaattatgcaaatatagcgaaaaataaagtctttaagtatgtttaaaaaaaggaccggacgatgggtatcgaacggtcctttctttaatctttatgtcgtatgctgttattcagcttctttttcagcagcttccttttctgccggagcatcttccggggtgaagtcagtgatgcctgcgttgatcaagatgttataccaagagagtagtttcttgatgtcgctcggataaacacgctcacgatcatagctaggcaatacctcggcaaagtacgcacgcaattggtccgtcgtggctttagaaggtactaaagaggcggcttttccctcttctttattctttacgctagtcaatacctcatgcaaaggcacttctgtttcatccgtatagattgcgatatcgcctaatgagattactttatcttttgcgtatgcgggtactctcttgttatcagtcagcgattcaacgatcaacatgttttttccatgggaaaccagtttatacagaccgggttttcccgaaatagacaaaatagtcttcaacataatgtttttattttctattagtgttaaacttcgaggtggcaaaggtaataagaaaaagtggaattcttccgtcatgaggacagttaacttcgttggagaagtatcttaggtgcatcgacaaagtatcttaggttcgttgacgaagtatcttaggttcattggatgatgaaggtaagatactgtaaaagccactcgtcccgctatcggtgattattgggattgaagccaacataacagtttgcctacttgcggtataagggcctgtctgttgtcattatagataacgtaatcggagcgatctttcttttcctcgtccgacatttggctgttgattctgcgttcgatttcttctctcgaggctgagtccctccccaaggctctttcgatgcggagttctcttggggcatagaccatcaagcttatgtctaccactttgtagaaaccggattcgaataatatggcggattcgatggcacataaaggggaagtctgtctctctacccaagccgagaaatgacggtttacctcaggatgaatgatctggttgacctgttgtaattgtttcggattattaaagatgtgggaggctagaagtttcttgttcaatccctcattcgtataaatctccggaccgaaaagggctgttaatttctcacggataaccggggagttatttgtcagccatttactttcctcgtccgctatgtatacgggtacaccggataacgctaataaagaggctacgacggatttgccgctcccgatccctcctgtaatacctattttaatcatgcttattgttgtgttccaaaataaattctaccttatctggcaataagattgccgtatgcacccagtctggtttcttggtgagtttgacgggtagggtaccagatacgttttgctccagatcctcaaaaggtatatgaatcgagaacatatcttccgaaagtcctttgaatcgggacaagggcacactgcaagtcacttttacgaccgccggaaacatacgtaccgtataatgtggcggtatatgactgcaagagacaggtatttccaatgtcttctccgtgtactcctctatcggaatcgtgatggatacactttccggatcgaagttaacgccgtctaccttgatcagttgtacggttctcgtaatgtttttattcgcctttttaacctcggtgaagaccgtcttaaccgaggtcagtgtatccaagatcgccgcggtggcataagcgttgatcttttgaggggtgattcggatatccccggatagttgaaagccggcttccagatgaatatcgccattaaagacgaccggtatttccttatggacccgctgactgaaatccatatctatttgttgcggatcaaaactttgtaatgccgtagtggctatcaattgtttttgaatatcgttctcgatctgccttttacttacttgaaccgaaccatttttctccttcgtattcttcatgttcacttcaatcggagcaaacgatcttccaaaagtatagttgagtaaaacgctacccttgtcttttacctttgcggtaatcgtttccacctcaggggcattaaacgctatatcggcaggtacgttcttatacttaaccggaaaaacaagttctatctcatattcctgctgcaagctttggagtagccagaaaccgaaagccaaaagggcgaaaaagaaaaagaccaagacctctttccatctgtctccgtggaaaaaagccttagtctttgcttggatagacttgaaggaattttgtatgttctcaagtcgtgacatattctgtagttagattatttctgctgctgagcgtcttccgctgaagcgaaaatagaagttttatctacacggatacgtactccatccgctacctcgattagcatataagtatcaccgatctctttgatctttccatagatacctccggcggtaatcactttatcgcctgttttcaacgcctcacgtgatttctggatttctttttgtttcttttgttgcggacggatcatgaagaaatagaagatagctacgataactaccatcatcaaaataccggaccactgacttcctccagctggagtttgaagtaaaatactgagtaagttcatactataataatcgttttacaagttaatatcaataatgatatgcacaaatgtaatgataataattaatctttgagcaataacttctctttttttaattcgttgactattgaatccagaattccgttaatgaatgttccgcttttaggtgtactataatactttgcggcatcgatatattcatttaaggtaacgttgatgggaatggtcgggaacgataaaatctcggctaaggcgacttgcatgatgatcaagtccatattggcgatacgttcggtttcccaattcttcatatgtttgtcgatgcgttcacgatattccttacctttcaacaaactttgacggaataacttgattgcgaaagccttgtcttccaaatccttgaacattggcaataaggcttgtttgctacctttcttctcctcgaatttcttgatagtcttcaaggcgaaagtctctacgatctcgatatcgtcattccagtagatgcttttatcttccagatattcctctatcatctcgtttccacagattattttcttgaagatctggcgccagaactcacgatccgtctcgtacgagtcttcttcgtttttcaagtattcggcgtaaatctcagaacttaggatcgtattcaatacgttcttaatgaactcctcgtcgttgctccatgagagaccttgctcgtctacatactttttcaacgtatcgttttccgctaattgagcgacgaaacgattgtctatgaagcgtgtattcgggtttaactcctcgtcggtaggcatgtatttgcacttccgggtgtcaaggatccttctttgcaggttggtaacttcgataattaggagtaagaaataataatataagtcatatgacttctgaaggctgaaaagcaattcgttttccgcaactttgaggtcaccgtttccgttttgatagtaagagtatactatctgtaaaactttaatgcggattaaaattctgttgatcatcgtttgaaggaacttcttattataaattaggctgcaaaggtagtcgttttttccataaaagaatccggatttacttaattttatatgtgttagatgatattttacaaatttagcctcaatgggcgtattttcgatcgttaaaatagttgctaattaaaaaaaaatgcacatatttgaagcaagttctataaagtgggtgggtttttaacgaatgttagctgtcatggaagaatcaaggaataaaaaacatgttgaaggtggcgacagggagattctatactctaaagccattaaagcgggaaaacggatttattatctggatgtgaagaggaatttgaaagatgacctattcgttgccgttacggaaagtaagaaaattcaatcaaaggatggtttgcaaatctcatttgagaagcataagattttcctttataaggaggactttgagaagttcatggagggaatgcaagatgtaatcagttatatcaagaactcaaatctgaagaaatctgcggaagacgtggtggaacctgaagaggaggaaacgattcatggcgattccccagaggaggatatggcttccggtgatataaagttggatattgagttttaatataacacgaagagaaaaagataacgggctgttttactcatagagagaaacagcccgttatgtgttaggagctttccgcaaaggaaaatcctattctttgctgcgaattattcagccgggtggatagcctctgtaggacatgcgtcagcgcaagttccacaatctgtacacatttcagggttgatgctgtatttatcaccttctgaaattgctcctaccggacactcatcaatacaagttccgcatgcaatacaatcatcgctaattacgtaagccatttttttaaacgtttaaattgataactattagtaggtgcaaaaatatagctttctttctatttaaaaaatatctactggcttattttcttcaaaaatcttcttttttgcaatatctttgtcgggttttcgttattaaacaaaataggttgagatttgagacgattattacttatattatatgtggtaagcttggctaccatgggagccatggctcaaaaggaaagggtgaggaatcagccgtacgctgatttgaaatggcttcatctggggtttcatgtgggtattcactcgcaggatttgttattgactcataccggtgtcatgaccaatggagagacttggttcgcggagattccttcttactcacccggctttagtgtcggggtgatcggagatatgtatatgaatccttatttcaatttacgtttcacgccttctatccatttcggagataagaaatttaagtttcgggaacaggctacgggagaggaattcatcacgaacgttcgttccagttatctgaatttccccttagacgttaaatatacggctttacgcttgaataattatcgtccttatttgatcggcggtatctatggctccgtggatataggccgtaagaaaggtaatccgattctattgaaaagcacggacttcggatttgagtttggcttgggatgtgatatctatctaccctactttaagttatgcccggagctgaaattctgtttcggattggttaacctattggagaaagatcgtccggacttggtagatcaagcaaatatcaaatatacggatgccttatcgaaagctacatcccgtatggtgatcctgacatttaatttcgaataaataactcgatatagatataagcggccggaatagccatcattacgctatcgaagcgatccagcatgcctccatgtccgggtaatacatgcccggaatctttcacgcctaacgtacgtttcatcaaagattcgatcaagtcgccccaagtcccgaatactacgatcgtgccggctaatccaagccatgtgtaccagttcgtggccggcatgaaccaagcgaatatttgggaggttattaatacgaatgccaaccctccgtaaaaaccttcccaggacttcttgggagagatacgttcgaacaatcttctttttccaagcatagatcccactagataagctcccgtatcatttacccatacgaaaacgaaaatagccaaggcaaaataggggatatgtacgatctcgcccggcgtattaggtaccgatgtaataaagtttagcagagagaaagagcctgcgcaatagatttgaccgaataaggtcaatgcccagttattgattggattactggctttatcgtaaagctcggtgatcatggtatacattaagaataaaagataggggagaaatatattgcctccaaccaagccattggcgtaaccgaatgtggcggcgaagaggtaggctccccccaaggaactgacaaatcgtttgatggcggcattctcataatgtttgaccaatccgtagaactcccatagagaaagtccggtaatgagtccaaataccgtaagaaaataataggagtggaaatagatcgcaccgaccaataccgcgacgaaaataatgccagtcaatgcacgtgtaatcagatttttcaaaacaatagtgtttttgcttgtttgtaattttggctgcaaatataactaataaattgataatacagcaataaggaaggctggatagtaacttttgatcaaagatacgccccagccttacttgttatgaatgtcttgactttggtcaagctattttccctgtcttgttttcttcggtaggagtatcggttacgttttccattgttgcgtccgctttcgcctccttatccgcattctccttgttctttccgttagccttttcctgcaactccagaatctcttgggaacgggagatccaggctcgtttcccgaagatatgctctacatcttccgagtagattacctcacgatccaataatacctgcgcaagtttactatgtccttccttattctcggataatatccgttttgccctgtcgtattgctcattgatgatcttctgtacttccgtatcgatcaatttcgcggtctcctcactataaggcttggtgaatccccaatcctgtccggtggagtcgtaatagttcaagtttggaagtttatcgctcataccgaagtaaacgaccatcgcatatgcttgtttcgtgacacgttccaaatcgttggatgcgcctgtggatatttttcccaagactaattcctctgcggcacgtcctcctaaagtagcgcacatctcgtcctgcaattgctcgcgggtggtgatctgtctctcttccggcaagtaccatgccgcacctaatgccttaccacggggaacgattgtcaccttaaccagcggattggcatgttccaacaaccaacttaacgtagcgtgaccggcctcatggttcgcgatacatttacgttcttcctccgtcgtgatcttcgaacgtttttcaagaccaccgacaatgcggtctaccgcattcatgaagtcttctttctgtacgaatttctttccgttacgggcggcgatcaaagcggcctcattacaaacattagcgatatcagcacccgagaagcccggagtctgccttgctaggaactcagcgtctacgctttcatctatcttgatcggacgcaaatgcaccccgaatatctctttacgttcattcaaatccggtaattcaacatggatttgtcggtcaaaacgtccggcacgcaacaacgctttatccaaaatgtccgcacggtttgtagcggctaagataataacaccactgttagagccgaaaccatccatttcggtcaacagctggttcaacgtgttctcacgctcatcgttgctattcatattcgcgttcttcccacgggcacggcctaccgcatcgatctcatcgataaagacgatacaaggagatttttccttcgcttggcggaataagtcacgcacacgggaggcgcctacaccgacaaacatctccacgaaatcagaaccagacaaggagaaaaacggcacattagcttctccggcaacagccttcgccaataatgtcttaccggttcccggagggcctaccaacaatgcacccttgggaatcttacctcctaattcagtatatttttccggattcttcaagaaagagacgatttcctctacctcttgtttcgcttccgccaatccggcgacatccttgaatgtcaccttacggtcattatctttatcaaaaagctgagcttttgccttaccaacgctgaacacgccacccggacctgcgccggtaccaccggacatacgtctcatcaagaacatccatacaccgatcaataagataatcgggccgaatgaaaccaagaaattccagatagcgtcatcgccttcctcgaatcggacttgtgtatcgatgtgactatcggctaccgctttgtcatagaaatcggaaaacttgtcggccgacgggatctttacgtatactttcggagaaaccccgattttagaaacgtccatattcccaaagacctgttcagtctttccatttttcactgtagcctccaccaagttcttcttgttgtagactgtcattttatcgaatacgttttcctgcgctagtttctggaactctgtccagcctagctctttcgctcccgaagaatcatttgtcatgtatagggcaacaagcatgatgaagatcaacccgtacatccaatacaaattaaagcggaacatcttaggtttcccgctcttcggtgttttattaaacatgtcgtttttattttccataagagattatcatcaaatatttagaccggcttaatcaatgttaggtacttgtataaccttcgagtctgcccaaaggttctccaagttataaaatgcacgttgttccggcaagaatatatgtacaagaaccgtaccataatccatgccgatccattgagcgtcctgtgtaccgtcaatagacaaaggcttctcatttgcattcttgcgtgcgaaatcccatacggaatcggataaagcagaaacttgggtaggagtgtttccctcacaaataaccatatattgacaaatggcaccagaagtctggcttaaatctactgttacaatatttttgcctcttttttcttgaaggccttcaacaatcgtttttactaattcttttgtttgatccatttatttctattgatataattttccaagtcgcaaatatacttcttaattcgttacatacgtctttttctttcattaatatatgtgtaatagcttgtttgagactatctcctcgatcgttataagcttttaaaaaaacacgtacgtctttttgagaaaacatgtacgtgttttatccgaaagacgtacgtgttttttctggacatttttttcgaaggtttatttgcaaattttgaaaaagtatatacctttgcactcgctaacaagagagttggcgatttgttaaatattgttctatggtgtaatggtagcacaacagattctggtcctgtttgtcctggttcgaatccaggtagaacaacgtttaaagtttacttgacaattttgtagagattgttctatggtgtaatggtagcacaacagattctggtcctgtttgtcctggttcgaatccaggtagaacaacataaaaaaagcctcgttattcgataagagtagcgaggcttttttgttgtagatatcatgtttttatttgtaacgaagccatttggacatctcctttatactgggtttcttaccatacatgagaatgcctacacggtatattttggcggaaaaccaagtgaaaccgatggatgatatatacaaaaatccaatggaaagtagtatttcccacaaaggcacctcgaatggcacccggaccatcatcacgatcggagaggtgaaggggatcatggagcaccagaaagctaatgatccgtcagggttttccatgctatagattcccgcatagagggcgaaaactaaaaggagcgtgactggtagcatgaattgttgcgtgtcttcttggccgtctacagctgatccgatagcggcgaataaagaagaatataataagtagccgcctatgaaataagcgataaacaagatgcctatctcggtgaagttaatcgtatgaagcatctctatccattcatttccatgctgctgggctgcgatagccgtcatgttaggggttgtgttaagtgccatgcttgattgcaagatctcgctttccatacctcctcccaaaaagaaagttcccccggtgatgagaataaaggtcataaccgcccaaaggaatacttgcgtaagcccgacaaaaccgattcctataattttacccatcattaagtcgaaaggtttgacggacgagatcataatctcgatgatccggttcgtcttttcttccataaccccttgcatgaccattgctccatagatcatgatgaacatatagataagcatggtgaaaataacaccggttatggaggctactacggatgaggattgcttttcgcttccgtcatccccccatttgatggtctgtatattgaaattgattttgctttcttttatgatttctttcaaattcgggatattgaacgttgccagtttgtcactttcaatctgcttctttagtgtcatattgacgagtcggctcaattctcccgggatttgtttcttggaatataaagtagcggcttttggattttccagtaaatcctccgtgatcgtaaggaacgcgaatatttccttatcagggatttgtttgtaggtatccatactctggtcactatggatgaaacgataagtctccgtatcctcgaatagcggggcgtatttacctgtggagtcgaggatcgctatggtatgtacctcgtcgcctttgatcgatgaaagccaaagagggacgaatacgagcgcggcaaatagaaacggtgtgaggaacgtgagcaggataaatgactttttacttactcttcggagatattcccgtttgatgattaatccaattttgctcatacctttgatgtgtttgtaccggaaacggtgttgataaaaatgtcattcatagaagggatctcctccgtgaaggaaagaatctcatattgggacgccagccgggtaagccaatcggagttactgatattttcttccttgcgtatccttaactcctcaatacctccagtctccttgcgtacatttaatatataggtattactcttaaaccgttcccgtacctccttgacattgccggacaggacgacctcagagcgattgattaaagcaatctcgtcacaaatctcctcaacggaggacatgttgtgagttgagaatataatggtatgtccggctgccttcaattccaatatctcttgtttaaggcgatcggcgttgaccggatcgaatccgctaaatggctcgtcaaagatcaatagctcgggttcgtgtatcacggtaatgatgaactgtactttctgctgcatacctttcgacagctcttccagtttgcgattccaccaaggcatgatgtcaaatttctcgaaccaacgggtcaaacgactgcgtgcctctgggtaggagagacctttcaattgtgccagatagatcgcctgctccccgactttcatctttttatacaaccctctctcttccggcaagtaaccgatctggtagatgtcttccgggctggattcatggccgttgaagcgaacgattccgctatccggtgccgtaatccggttgatgatccggatcaaggtcgtcttgcccgctccgttaggccccagtaatccaaagattgttccttgaggaacttggatacttaccttgttcagcgccagatgcccggcgtactgttttaccacgttttctgtctcaaggaaattcatagatgtttttttattacatttttaatacgatacgctcacccagctctttgcagagcacgttcttgatctcgttgaggtgggcattctgtttcattaaatcaaagatcagctccatgtctcccttgttttgagcctctttgattttcgcttggatatcctttatcttatagaggatataggcatctttcatagaatagatttcccggggtaccaagtaatccaatttatcttcttcttgctccagttccctgaacttcgtatgatatttactaagctggtacttatcgctgataaggttggcggcaagccggctgatgttcgggtccggatgggcaaggaaataacgagtggccataaaaccctcgttctggcaatgctcggcagcctcgtccaacatttgcttgaaggtcggcgtataaaacgtaaggtcatcacgttccagatcgaaacggatataatcggcgacccgcatgataacatgctcgttggtctcctcatctacgtagtcatagaggacacgttcgccgtatcgtacgatatagcgtaaaagagccaattcgtaagcctcgaaaggagagcgtttcggttggacctgtatgttgggagccgtcggaacctcgtatggaggagtagggggcggacccgcttcctcttccggaatatagtcctcgggcggtggaggcggaatattttccggaggaagggtattcgcctcttccggtgtatacggttggtagccggggaaatccggatactccggaatcgtattgacgggagattgaacgggcggtgtattccttacggatttagccgcttggttctcttccttgttgagacggatcttattgacctcgttgagtaagacttgctcgtctatctccatggtcgtactacattcccggatatacacggagcgagcgatattatcaggtatgatcgctaccgtacggataatatccgagatcagggcggaacgtttgatcggatcgccccccgcttccgccaatagtaactttgtcttgaaacggatgaaatccgtctcgttctggctgataaactctgcgaactcgctcgcgctatggctacgggcaaacgagtccggatcttctcccgccggaagaagcacgaccttgacgttcatcccttcttccaataacatatcgataccccggagggccgctttgattccggcggcgtctccatcgtataataccgtgatattattcgtgaaacgatgtatgagccggatttgcccttgcgtgagcgccgtacccgaggaggcaaccacgttttctacgcccacttggtgcataccgatcacgtccatatatccttccaccaagaaacagcgatcctgtttcatgattgcttgcttggcgaaatagatgccgtaaagctcgttactcttatgataaatctcgctttcgggagagtttacgtacttcgcggtcttctcgtcctttttcaatacacgtccgccgaatgccacgacctttccgcttagcgtatggacgggaaagatgacacgtccccgaaaacgatcgttcacgtttccattatcataagcgataactaaaccggttttctcgaggaattcctttttataacctgcttttatagcggttttgtataaagcatcccgctggtccaagctatacccgagctggaatttacggatgatatcttccctcaatcctcgctcggcaaagtaacgcatacctacgcttttcccttcaacatgctcatgtaataaagtagagaagtattgtcccgcccaactattgacgataagcatactttcccggtcgctacggatttgtttctctttctcggtaagttcccgttcctgtatctctatattgtattttttcgccagaaagcgtaaagcgtcgaaatagctgagttgctcatgcttcatgatgaagtgaacggcggttccaccttctccgcaagcgaaacacttacagatattctttgagggggatacgtaaaaagacggtgatttgtccgaatgaaatgggcataatcctacatagttgatccctcgtttccgaagagtcacgaattcagagacaacatccacgatgttcgccgcgtccaatatccggtctatggtaggttgatcgatcattttaaattactccttttttagcgaacacaaatgtagtgaaaaataaccaaacacaaacaaggcttgatgtttgcttgtgtttggttattttttgctatatttgcggcgtgaaacgaatgctattcgccaagtagcctatttgccaaaatagctcaaaggctataaaaatgccttctcggtattaaatatagggtcttttgagcgtaaaacaagttggcttcgatggcaacaaaaggtcttgaaaagagagtatacgctttctaacttacaagagtctattgtataactgattggatattaagaaaatacacatcctttcaggactagaagaattatcccttatccaatggaatatcctttaacagacgattggttcgtattgcgagacttgacccgtcccaatgctaaacgcccggcctataggttgctagaggaaaagggtattgagattttcactcctatgcgttggcggttggtcgagaggaagggtaagcggattcgtgaggaggttcctcttctgcacgatttactttttgcccatactacccgtacctgtatggatccaatcgtagaagagatcagtaccctccaatatcgttatttgcgtggtggctaccgtaagccgatgacggtaggccatgcggagatgaaccgttttatctgtgctgtccattccgatgattccccacgttatttcttggtggaagaattaactcctgcgatgtacggtcgcatgatccgcatcgagggtggtccactggatggctacgagggtcgtttactctctatacgagggacccgtgtgaaacgtttgatcgtagagataccaggtctgttggttgctgctgtagaggtcgatcctaaatatattcggttactataacatatatctacctatctgtctcttgaggatatatactacatgtgcatccggatatatactgtatattcccttgaatatatactgcgtgaccgaagtcagtgctaacgctttttatgtggttcgttttgatggctatccaagcagtatgaaggctgtgtgcaaatcaagaaagttgtacgcttgagaatttgaagagtgttacagttgctctaaatttgaaggataccaattctcaataagatatatgcattcaatatccgagaataataagcggatagcgaagaacacgctgttcctctatgtacgtatgctcttgatcatgggggtgacactatacaccagccgagttgtattacagatgctgggggtagaggactacgggatttataacgtggtgggaggaatagttgtactctttacgtttgtcaataacgccatggtcacctccacgcaacggttcttgaattatgagttgggacgtggggatttggtgacaacccaacacgtgttctctgccagtgtcacgatccatctaggaatagcgttgctgacgttcgtacttgcggagactgctgggttgtggtttttggaacgctacatccaatatcctgcggataggggatgggcggtgacacttacatatcaatttacgatattgggcacttgtgttaatatcatgcgtgctccttataacgcagccattatcgcacatgagcggatgtcattctatgcttatatcagtgtgattgaggccgtgtttcgtttgttgattgtgtatttgttgacttggaccgcatgggatcgtttgatcttttatgggttcttgatgtttgtcgtactggctttggtgttggcttgttattatttgtattgcaggcgatcgtttgcagtatgtcattatcatttcttttgggataaagggttgttctgcgagttgctaggtttctctggctggagtctgtttggaggaatagccaatatgggagcctcgcaaggattgaacatcttgttgaatctttttttcggcgtgacggtgaacgctgctatgggtatcgccaatcaggtacaaacggcggtctatagttttgtgagtaatttccagacagcattcaatcctcagatcgtgaaatcctatgtgtcaggcgatcgttgttatttcatcgacttgatcatgcgtacctcgaaatactcttatttcctgttgttcgctatctctttgcctctgtatatctgttgtgaggaagtgttgtcgctgtggttgggggaggtacctgcgcatacggtgtcgttttgtcgcttgatgatattgctctctttgctggacgctttgcaaggtccactttgggtatcggtacaggccacgggaaagatccgtgattatcagatactgatgagtgtgatgatcctggccaacctgccagtcagttatttgtttttgaggatagggtatgtaccagaggtggtactggagattcgttgtattttgagtattttgatactttgggtgcgcttgtggtatttgaagcggctttatgctttttctattaaaagatatttgcgagaggtgttagggagagtgatcgtggtgactgcgtttgtcttccctattgtttatttaccattggaaatgattggtgatgaagagaaaattatttttttaggaatactctcgttggtattgaattttttagttatgtattgtttcggtttagatagaagagaacgggaaattttgattgttcaacttaggaaaatttgtgggatatataagtgatagaggaaaaattgtagtcgttatgaaaaatgtttatctgtaatagatattgaaatgattgattataaatggcttaaatataaaataatggattttcaggaaaagatagaagaattaaggaagataataaaagataatatagaacctttaataacatcagattatgtacatttagataatccttatcatggtaatataggagatatattgatatgggaaggtgaaaggcagtttttatcttctataaaatataagtgtttgcagtcttcgtcaaattcatggtgtgaaaattacctccaccccgaaaccgttatactgtttaatggtggaggtaattttggtgatttgtatagggagtgtcaagatttccgtttgagagtaatagaacagttcccaaataatcggatcataatgtttcctcagtctatttggtatgaggatgaatctttaatagcgaaagatgcggcagtcatggctcgtcataatgatttgacattgtgtgcgcgtgataaatggagttataactttttgaaagagcattttggaaagaataagattttgttagttccagatatggctttttatatatctgatgaatatttgaataaatacagagaatgtgttttttgggggcaaaaactttatctgaggcgtattgataaggaaatggatttttctaccatattggatgatttgagaggttttgatatacgtgactggccctcattagaaagaagaccaatttgcttattgattttgaggataatgaaaagagctgcttattacttgcaaaaaataacttgtttaactgttttgcaaagatttgttaaccgtctggctgatgaatatgctatccgtattgttcgtccttatcttctaaagagaggttgtgattttatttccccttactcggaagtaataacgactcgtttgcatgggttaattttatctattttatttcataagccagtttattatataaataatacgacaggcaaattatcagcttatgtggatacatggcatttgcaggatattttagaagtatctccttatgtggataaaatattagaaaagcatgttgattagtgtagtattgccggcttataatgttcaagatacgataggggaatctatcgatagtattttaagccaaacatttacggactttgagttgatcattatcaatgacggatcgcaggataatacagaagaggtgattcatgcttattcggataagagaattcgttattatcggaatgaaaaaaatgagggtttgatctatacattgaatagaggattggacttggctcaagggaaatatatagcacggatggatgctgatgatgtttctcttccaacacgttttgaaaagcaagtcaaggtgatggaggaaagtccaaatatcgtagtttgtggaacgcaaatcattctttttggagtagatacggctaagagattcactctgtttttgccagaagaatcggaagatctgaaaaatctattgtttattcagacttgttttgctcatccaacggtaatggttcgtcggcaagtgctcattgataacgaggtgaggtatgatgctgattatcctcatgcggaggattataagatgtggattgatttatctttgttgggtgagttttataatatacaggaaccgttgttgagatatagattgtcggatgggcaagtaagtcataaatttagtgatgtccagaaacggactgcatctgcttgtcgtaggtttttaatttctgcacggtttaaggatgaaaagttggatcgtcaaatcgaaaatagtatagatataagtacaatttgttatataaaaaagaaagagtacccacgagaattattggaagtactttattcctctttaagaaagtataactttaaatgtttgtgttatttgtttgttagtggtgatatttttcgatttgaaattgttgttgcattggctttattaaagagatttattataaagaaagatagactattatgaatgtgtctaatagagggtatctatattttgttcgtttgtcaggaaaaataattctgctattttgtgtgttttcttatgtgtatcaaatacattataagatctttcctgtgaccttttctgttatattagggctttttggtattttatataatttctttataaatagaggtatttttaaaatcaaatggtgtaatttttatgttttttgtgggttttatttggttattatatctttgattatttctgctgttgtaaatggtactaatgattatacttttttgcaatttggaattgtgaatcttttaaatgtgtattcattttatacgatatcgattctttttaaaattctatataaagatataagttttgaattgattgtgaaatattatattgcttcagcgttgcttcaattgattatttcattagttatgtttttagatgtggataaaatggtgtgttttactgatttattgaagtatacgtctttggctgaaactaaattgattgaagagatgggagctagattgatagggtttggtactcaattttttcaatcaggtataatacatggaatgattttgttgttgttagtattttatgctgataaaaaaaagtgtatgttatatgaaaaagtattcttgtgctttgttttttgtttgatatctattgttggtatgatgatggcaagaacaactttagtgggtgttttaatggcgattgcttttgttatatttaaatctaatatgtggaaattaaaaatcaaaattagttcgattaaattggttttgagtatgtttgttgtgttgtgtgctttttctttattcgtgatgaatttttcttatgaggtgaagactagtttgttggtagcctatgattttggatttgaattgattaattcatatactcagacagggcaattggaaacggcttcgacaaatgcaatgtttagaatgtatatatttccttctttgtttaagacatgggtgataggagacgggctatggatggattcttttggcaggttttatatgcatacagatattggatttatacgtatgatattctattttggaattgttggattgattagttttattgtgtttcaatctgtatctatatttgcagtttatagaaataataaatatcttggaaaaattccttttattttaatatttgtttatttttttgttttgaatttgaaagggtttactgatttgttttatctaattattccgttttgttactgctctagttttactttaaaacataggtattaattctttatgtgtaatattttgattgtaacccatgcttttcttccagatttagatggaggaatcattgttgcttatgattatgcaaatcttttggtagacttgggtcataaagtgactgtattatcgaaggaatataagaatccaatccaaagtactaaatttacatatattcaaatacccaataaatatggtgagtatttttggatgtataattatggtacgttcttgaaaaatatggatttggatggttttgatcttatcttgttgaatcagtgtccttcggctgctatagcaggaaaatatttctcaaaagaacaattgagtagaactgtacctatcatacaaggtgtggaggttgaatgggtttatagaaatgtagacctgaagagtaatcttttctataacgtgtttttgaggatgaaacattatcataggaagtgtttgatgagttgtagaaagattgtctcggtcagtgattttcatagacaaaaagtaatctctgccggagattttcaatccatatcaaataaatttcaggtaatctatacaggaatagataaagaactatttagggaaattccttccgattttaggaagcaaatagtcgcttttgataaagatatattgcttacggttagtaggatagaaaagatgaaaggtcttgcggagatgttatctgtttataagcgtttgatagaaaaaaatgaccgatatatatgggtaattattggtgatggcccttatttgcaatcgttgaaggaagaggttaaaagagaagggttagctacatctgttatttttttaggaagaaggaatagggatgagttgagttattattattctgcggctgattgtttttggttactgtctaattatgatgaatgtcttcctttggtttatttagaggctcaagcttgtggtattcctgcgatcggacgtaagaaaggggggacgcaagaaacgatccggaatcgtagaactggttttcttgttaagtctgatgaggagtgccttgagattcttttaaatagagaatataggtatattgagaaagatgcgcttcgtgatttttctgcttcttttgataaaatacaagcgactcaaagtttaatatcttaaagattcatattctatacatcatgagaaatatagctgtggttttggccggtggtttcggtcaacgtttaggagatgcgacacctaaacagttcttgaagttagcggggaaaaaagtgattgaacatacgatagatgttttccaaaatcatccgttaatagatgagatcgttgtggtttctaatcctaattatgtgcaggaggtagagaatatcttggtgaagaatgaatattccaagatgaagaaaatcctcaagggaggaaaggaacgttaccattcaagtttagcggcgattaatgcttatgaggaagaggtgaatatgattttccacgatgcggttcgcccattggtcaatgatcgtattatatctgattgtatcaatgccttgaaaacgtataatgcggtggatgtcgcaatcaagacgactgatacgatcattcaaattgatgcggcggaccatattaccggaatacctgctagggagtatttgcgtaacggacagactccgcaagcttttaagcgttctacgataaaacgagcttatgaattggctttaaaggatgttagttttcaaacgacagatgattgtggggttgtctacaagtatcttccggaagaattcgtgtatgtagtcaagggtgaacagtttaatatgaaattgacttacaaagaagatctgtttttattggataaattgtttcagctaaaatcaatcgctcaacagaatgaaacggtaactcctaagactatagccgctttgccttcatcggttatcgttgtttttggcggaagctatgggattgggcttgatattatccatatttgtcgccagtacggggcgcatatctattctttcagccgttcagagaatggagtggatgtctccgatcctgctctagtggctgatgctttgagaactgtcatggataaggaaggacgtatagatgcggttgtcaatacggctggagtcttgaatcgggagccattggctacaatgacatatgaggagatttgtaaaagtattcatgtgaattatcttggagctgttattgtagcaagggaatcttatccgtatttaaaaatgagcaaaggggcgttgctgctgtttacttccagttcttatacgagggggcgtcaattatatagcttgtattcatcttctaaagccgctatcgtgaattttgtacaagcgttgagtgaagagtggcaggatagtggtattcgtatcaattgtattaatccggaacggactaagacccctatgcgggagagaaattttggcatagaaccggaggataccttgttgaaatcaagtgttgttgcgtctgtgtcggtgaatactatattttcttccctgaccggagaagtggtggatgttaaaaaaagaccgtaaagatgaaatctgatagtgaattgatgaatgagttagctcataaaacgaattatttacatgagatgacatcttcggagtcttctgccatgaagcgagctttgttggatatatacagggatgtagcgaaattatgtgaaaaagaaggcttgacattaatgctcagtggtggaagttgtttgggagcagtccgacataaaggttttataccttgggatgatgatttagacgtaatgatgagacgtgatgattatgaaagattgattcgattgtgtaaggaggggaggttaggtgataaatatgagtttgactatcctaataaggatgctgatgcgaaaacagtattcttgaagatatatagaaagaactcctttaatatagaacttttcaatgaaaactctcccttccctaaaggtttatatattgatgtatttgctttagattcagtacctcagtctaagttcatgcaagccatgaaaggttttgttgccaatgtaatccagtttatatccattatggttttgtatgcgcagtatcctagtaagtctttgtctgaatttgtatctctagattcatcgttaaagagaagatatcagattaagaaaatcatgggatctttcttcggaattattccacatgcaaaatgggtttattggtttgatcgttttgtggcttcttcaaagaatggtaaccctctaggtattcctactggtagaaaatattataatggagaaatatttgatgcttctgtatattttcctccaaaagaggctttgtttgaaggagaaatcgtttatatacctgctgactatgatcggtatttgacaaatctttatcatgattatatgcaattgcctccagtagaaaaaagagagaggcattttattttgaagtttcaattgcctaatgattgaagcatagaaaatttttgtattctattatttagaatgaaaaacaagctatttagcgtacttatttctgtttataagaacgataaccctgatgattttagaacagctatcgagagtgtgaccattaagcagacggtacaaccggatgaagtgttcgtctatgtggatggacctgtacctaatgctctggcgagtactatcaaacaacttgaaatggagattccggctgtttatgtacattgggaggttgagaataaaggtctcggcagggctttgcaatatggtatggaacatgtgaagcatgagttggtcgcacgaatggatgcagatgatatatctgttccggacagatttgaatgtcaactttgtcagtttgagaaagatctagagttgagtgttgcaagtgggcacattgttgattttattggtactcctgaaaatgttatcggtaaacgtacagttcccataggtagtgagacatgtatgcaatatatcaagaaacgcgatgtagttaatcatcctgcggtgatgttccgaaagtcggaagtgttgcgagctggtaactatcaggattggtatttaaacgaagattcttatttgtggttgagaatgtatctagtgggatgcaaattcaataatttagatagagtacttgtatatatgcgttcgggcgaaggacagtatgctagacgtggtggttggaaatacttcaggagtgaagctggtttacagaagttgcgttataaacatagaatcatcagttttcctcgatacttatttaatatgacagtccatttcacagtgaaagtgttgatgccaaacagtgtaagagggtgggtatttcagaagttgttaagagaataaaattatatctaacaaaaggtttaggtactatttgtgttattttatagtgttgttgtattttatgaagaagatacctttttcgcctcccgatatgtcagaggcagagatcaatgaagttgcagaggctcttcgttccggttggatcactacggggcctaagacaaaagaatttgagagattaattgccttgtgttgtcagacggagcaagctgtatgcttgaattcggctacggcttgtatggagttgatattgcgtgttttgggcgttggacaaggagacgaggtgattactcccgcttatacgtataccgctaccgcaagtgtaacttgtcatgtgggggcaaaggttgtcatggtggataccgctcctgattcgtttgagatggattatgataagttggcagatgcgatcacggagaggacaaaggtggttctgcctgttgatcttgccggtgtggtttgtgattatgataagatattcgctgccgtagagagcaagaaacatttgttttcgccagcgaacgatatccagaaggcatacggtcgggttatcgtacttgcggatgccgctcatgcttttggtgccaaatggcatggaaagatgtgtggcgagatcgctgattttacttcgttttccttccatgccgtgaaaaaccttacgaccgcagagggaggtgcgttgacttggagaaatcatgatggggttgacaacgagtctctttataaacagtttcaattgctttcccttcatgggcagaacaaggatgcgtttgctaaaacgaggttgggggcatgggagtatgatattgtggctccgtattataagtgtaatatgacggatgtgatggcgggtattggccttgcgcagttgaagcgttatccggaaatgctgtatcgtcgtcgtcagattattgagaggtataatgaaggactgaaggggtgtgatgtgcaggtcttggatcattttggtgatgaccattcttcgagtgggcatttgtatcttgtacgtttgcttggtgaggatgtggaatatcgaaatgttgtgatagaacaaatggctgaacgtgggatcgcttgtaacgtacattataagcctttacctataatgacggcctataaaaatttaggctttgatatcgcaaattatccgaatgcttataaccaataccataatgagattactttacctttacacaccagtcttacggatgaggatgtggagtatgtgatttccaattttgttgacattatttcccaataaaataacccaaacgatttgaaacgtatatttgatattgttgcgagcgggatagggcttatcttgcttagtcctctatttatcattttgacaatttggattaagtgtgattctatcggtccagtcttttataagcaagttcgtgtggggcgtaataatatggattttcagctatttaaattccgtagcatgcgtgtgggttcagataagaaaggacttattactgtaggtggacatgatcctcggattactcggtccggctattatatccgtaaatacaaattggatgaatttcctcaattgattaatgtgtttaaaggggatatgagtttggttggtcctcgtccagaagttcgtaagtatgttgatatgtatacggaagaacaaatgcatgtgttggatgttaggccgggcattactgatttggcttctattcggtatcgaaatgagaatgaacttcttgaacgggttaatgatccagataagtattatgttgaagtaataatgccagataaattgcgtattaatctggaatatgttgccagacattcctttactttcgatataagattgatatttcaaacatttagagctattgtatcggaatagcccaaaagagcttttattctatagattattcgtgtaactatataaacaagaattgatatgagggatcctttttctcgactatctacctggtacttttccaagaaatccttaccctattggggtattatcttgctggattgctgcttgatcttattttccggcttgttggtgtataccttgaataatggcgtattatcaaccttggatatcttggggcacctgctggtcacgctattggtatgcctgattccttatctggtaggctttcgcctgttccatacctattcggggattatacgttattcctctttcgtggacttgcaaaaggtgggattcgccgtcttgtttggcttgatttgcgtggtcgtgtttcaggcgttgacggacttttctccttatttggtgtatatccgtaaacgggatctgatcctctctgcgttgttggctatgagcttgatgtggatgatgcgtgtgttcgtgaaatatttttatgtaagtacttttcgtgtggctaaggcggaacgagcctttatctatggcgtgaagcaaggtggggtgagtttggcgaagagtatccagaatcaggatccggcccggtttgtgctggctggatttatctcggacatggctgagattgggaatcggtatttaatgggagtcaaggtttatccgaataacgaggatttgattggtgtgatgagaaggctgcaagccgatgtcttgctggtgtctccattgaaagttgaggcgatccggaataatcaggagatggtggacaggctgatcaaggcgaatataaagatctatatgactcctgccgcccaagagtgggacgggaagagcgacttgagccatacccagctgagggaggtgaatatagaggatttactgccccgtgataagatcgagatagacttggaggctgtgaggaagcagcttaccggtaagcggattctgataacaggagccgccgggagtatcggtagcgagatcgtgcggcaggtagcccagttcgccccggaacgtatggtcttgatagatcaggcggagacccccttacacgatgtccgcttgatgatggctcgtcagtggtcgaatatagaatcctatacggttgtgagcgatatttgtgtgcgtgaacgcatggaggagctattcgaggagcatcgtccggattacgtgtttcatgccgcggcctacaagcatgtacctatgatggaggataatccggaggagagtgtccgtaacaacgtggacggtacccgggtgatcgcagacttgtcggtgaaatacggcacgaggaagtttgtgatggtatcgactgacaaggcggtgaatcccacgaacgtgatgggctgctcgaaacgtatttgcgagatctacgtgcagagcttggatcaggctatcaaggatgggaaggtgagggggcgtacgcaattcgtgacgactcgtttcggtaatgtgctgggatcgaacggttccgtgatcccgttattcaaggaacagatcaagcggggcggtccggttacggtgacgcacaaggatatcattcgtttcttcatgctgataccggaggcttgtaagctggtcctagaggccggtacgatgggtaatgggggagagatcttcgtgttcgatatgggtaaacctgtacggatcgtggatctggctgagcgtatgatccgtctgagcggggtgaagggaatcgagatccggttcacgggattgcgagacggggagaagttgtatgaggaggtactcaatgaggaggagacctccaagcctacttttcatccgaagatcaagatcgcccaagtccgtgcgtatgactatgctgacgccaatctgcagattgatgccttggtacatgcttgtgccgtggagggggatatgcagatcgtgaagcggatgaaggagattgttcctgagttcaagagccagcattctaaatacgaggttctggataaataaattgtagaaaaataaataagatacaaaaagaaggtctctcattgcgggggacctttttttatgagataagcgttgtctttgggatagtatttcgtatttttgctcatacaatttaattagtgttgtttgtgataagatgaaggaatgagtatggtacgaataagaaagatattgctggttgttgtgtctgtgttggtcgggatctttttcatacttcccttgatcggggttggtatactgaaatgggcggtcttacctccggagaagctgacaccgctggtcgtagaaaaaacaaacgaattcatagaggcgcacttggaatgtgagcgggtggagttgacttatttcgagacgtatccttatctgggagtgaagttgacgaatggacgtttgatctcacatctggctgaggattctataggctatcaggaggatttgatgattccttcggattctttgttgtctttcaaaaaagcgatcgtcgtatttaaccctacggattatctgtttagcgggaaggtgacgattcctcgggttatcatggatagtatccgtttttatggttatgtgaatgaggagggaaaggcgaattgggagatttatcaaagtgagatggattcggtagacgaattatcgtcatctccattgcctaaaatagatttgcagcaagtgcatattacgaatgggcactttgtctatgatgaccgccagcaggatttatatacggcgatcgatggtttctttttacatatagatggccttttgacccaacgaggaaataagttggatgtggagaccggttcttcctcgatcgtattccgtagcccgtcttattctttggcgaataagttagcgttacgcttcaagggacgtttgttgttggctgatggacttcgccggattgggttgagggacgcggagttgctggtgaataatctgccttttacggcggatggctttatggtgccggctaccgaggataatccgtcacggatcgatatgactttcgggttgaaggtttccgatatgaatgatctcttacattttattccggatgaatattttaaggatcgggataaaacacttgctgagggacgtattattttggaaggggatatccgtggagaattaggggatagtatcgttccgaccgtgaacttatgctgcaagatagaggatggttcttatcatgtaaaaggtattgaacaggggatcgataccttgcgcatggacatggatttacatttgaatggcgcttacccagattcttcttatgtctctttggaggagctgacattgatcgggttgaatacctcgctgaccatgagtggagaggttagggatatctggaggaatcccgcgattcgggcggagatgaaagggcaggtcgattttacccgtttggctaaagagttcttgaatcccgacacactgctgctggagggtaccatgatggctgatttatctacggtgtttaaggtggatgatatcgtgaatagccgcttcgccaaggtcaaatcatccggcaatttgacggttgatcgcttcaaggcgtttagtaagccgttaggcgtggatatgtatatcgctggggcgaatctgtttgtaggatctacggaaaatgaaagtaaatatctgaatgcgaaaggattgttgagcgctaatctatcggtggataccttgaatataaagtataaggatgagatcagtacgaatatcggtggattgaagatggtagccaatacgacgccggttattgatacaacggctgttatccctatgaccgcagggttggaatttgatcatttacgcaccaagttgccggattctacctggatggtggccggtaagaccgtgttgaaagggggcatcaaggcttcttctacagataagcggatccctatggcgggagctacgatctcggtggacaccttaaaatatattcttatccctttacggacgggtatggttctgacggaaagccagttctctttggaagcattaccttatcggcaagcgattcgtcaacaacgtgaacgccgtattgccgccggtgataccttgcgcaggcgcacgcagaccacccgaagggcgaatagacagcggtcgcaagtggattcggtcgcttcctcaaacagtgtcttacgccaatgggaggctcggggacaagtgaggtttaagcaattgaggggctttagccgcttattccccattccgatgtatattgatgagacaagcgtgaaattcaatactaacaatatgacgttgagtggtgcccgcctgcatttaggaaagagcgattttactttgagcggagagcttagcgacatccggcgggccatgctacggggaggaaagctgaaagcgaatttcgagttggaatccgatctgatcgattgtaaccagttgatgctagctataggtaaaggtttgcagttttcagatcaattggcatccaattcagttggggccttctcggaagacagtatctccgtactggagacggatcatctattagcgaataccgtggatagtgtcgctacggattcgatctctcaactatttgtcgttccgaaattcttggatctgacgcttcatacaaatgctaaaaaaatagattttaaggatctgaagttggaggatgtgaaaggtgaggttgtaatccgggatcaaagtatcaatctgagcgatttatgtatgagctcgaatatcggttctggagatctgacgatggtttatacgaccaaaacagatcaagaggcgactatgggatttgagttgtccttaaatgatattttagtggaacggttaatcagtttattcccggatattgatacattggtccctatgcttcgttcgttcgaaggcatggtagattgccagatgacggcgacttgcaaggcggattctacgatgtccgtgttgctgccgtctgtaaatgcctcttgctacctgagcggaaagaatatggtgctgctggatggtgagacatttaccgagatatcgaagacgctgatgttcaagaataaaaaacggaatatgattgatagtatagcggtagatttagcgatccatgataacaagatcgaggtattcccattcttggtggagatggaccggtataaagtagccgtaggaggaacgcataatttggatatgacgttcgattaccatctctcggttttaaaatcgccggtgccgtttaagctgggtatcgatataaaagggaatctggatgatttcaagttcaagatagtgaaatgtaaatataaagatttcttgaaacctaccaagcaagcggaactggatagtacccgcaggaatgtgcgtgaggagatacgcgagacgatccggaaacaaataagagaggccgctcccgaattaggaaacagcctctctgagattcatccacatacacacggtcacgttgaggaatcaacgtgatccatacatttgctcgtaatatttcatgtaatctccaccggtgatatcctccacccatttctggttctcaagataccaacggatggtttttacgataccaacctcgaagcaggtctctggtgtccagcctaattcgttggtgatcttcgtcgggtcgattgcgtatcgttgatcatggcccagacggtcttttacgaatgtaatcaagctgtcgttgatccagtcgatagagatttctccatcggcaccgatctcttttttctttaatacttggcgatattccggttgttcggtcattagttgatggatcgtccggatcgtgagttttacgatctcgatgttctgcttctcgttatgaccgcctacgttgtaaacctctcccacacgtccgtggtggatgacggcgtcgatcgccttgcaatgatcctctacatataaccagtcgcgtacgtttgtgccgtcaccatatacaggtagggatttaccttccaatatgttctttataattaaaggaatcaatttttccgggaaatggtaaggtccgtagttgttggaacaacgggtaatagataccggcatcttatacgtctcgtggtaagcctttacgaataagtccgcgcttgtcttggaggcgctgtatgggcttcggggatctaaaggcgtggtctcgtggaaatacccttcggcacctaggcttccatagacctcatcggtagagacttgatggaaacgtacaccttcacgccataccggataaccagtctcggccttaccggtaacccatgcttttcgtgcggcgtccaataggttttgtgtaccaaggatgttggtttgcaggaatagctggggattttcgatgcttcggtctacatgactttcagcggcgaagttcacgacataatcgaagttgtatttctcgaatagctggtcggccaaggcacggtcgcaaatatcgcctttcacgaactcgcaacgtactccatcgatatcctcggcgatggtgcctaaattacctgcgtaagtcagcaagtctaggacaacgatcttgatatcgtcatatttcgccagcatatgtttgatgaaattggcaccgataaaaccggcggcaccggtaactaggtaagttttcatatctgtacagtgtttagtatttgaaattaagctcagcgtctttcagcaatggagccttggtgtctttctcggataggttgatcgattccggatctgtgatgctccaatctacatggaccgtgggatcgtcatagcggattccccgttcatgcgtcggagtatatggattatctactttataggtaaagatagcctcgtcacttaatacatggaatccgtgggcgaatccctgtggaataaataactggcgtttattctcgtccgataactctacagctacatatttgccgaatgtgggcgagccttcacgtacgtctacggctacatccaatacccgtcctttgatcaccctgactaatttagattgagaatagggcgctagctgatagtgtaatcctcgtaatacgcctttagaggagcaagattcgttgtcttgcacgaactggatttttccgatatgctcctcgaattccgcttgcttaaaagcttccataaagtatccgcgcgcatctttcaatacctttggctcaatgatccatacgcccggtattacagtttctgtataagtcattttttcgttatttatctatttgataggcaaaggtaagctcattttctctacttctataatattcggagggaaaaataaaaaagaaaggaaaagtttggtaattccaatattattctctttctttgcactcgcaaaacaaaagtagttgttttgtgttgaagttatggttccttggatgagtggcttagtcagcggtctgcaaaaccgtgtacggcggttcgaatccgccaggaacctcttggtaattgaaaattcagtattaagaattgaaaattacttttatttttgattgattcggttccttggatgagtggcttagtcagtggtctgcaaaaccatgtacggcggttcgaatccgccaggaacctcggaggaaagcctcgaagttgtttgtaatgaacgcttcgaggctttttttgttttgtccgtttgtaactctcgccgggttgtcgggcggttcgctgttttcatggcttcccttggccggatccttagggggatttgtggttttcctcttgaggtattcatcttctaatggctgttgcatgatcgtccaccatccgttgcatgatcatgtaacagttggtggacgatcatgcaacggatggtggataatgaatgtctcaggaggaaaggcgtaataggacaagggaagatcttttaaaagtatcgtgataaggaagaatatttgcccagtgtgtttatgcttcccgaatttattactacctttgcgccactcaattaaataatcataattgcatgcacgagaaacttattattcttgatttcggctcgcaaacaacccagcttatcggccgtagggtcagagagttgaatatgtattgtgagatcgttccttataacaaattcccgcatgacgctaccgacgtgaaaggtgtgatcctttccggaagtccttattccgtatacgacgagaatgcctttaaggctgatttgaccgagatacgggggaagtatcccgtcttaggtatttgttatggagcgcagtttctagcttatacatccggaggtaatgtggaaccggctaattcacgtgagtatggacgtgctaatttgtcgcacattgatggtgaggatgaattactgaaagggatccatgtgggttcacagatatggatgtctcatggggatacgattaccgtattgccggataatttcaaggtgatcgccagcacggacgacgtgagggctgccgcttaccatgtggaaggtgagcaaacgtggggcgttcagtttcatccggaagtattccattcgacagacggtacgaagttgctggataacttcttgaatatttgcggatgcgccaaggattggacaccggcttcctttatcgaatctaccgtagctgagttgaaggagcaattgggagatgacaaggtgatcttggctctttccggcggtgtggattcatctgttacggccgtattgctgaataaggcgatcggtaagaacttgacttgcattttcgtggatcatggtttgctgcgcaagaatgagttcgagaacgtaatgagggattatgagcatttaggattgaacgtgatcggcgtaaacgcaaaagataagttctataaagaactagcgggcgttacggaaccggagaagaaacgtaagatcatcggcaaaggatttatcgatgtcttcgatgaggaggcgcataagctgaaagatatcaagtggctggggcaaggtacgatttatccggatgtgatcgagtcgctttctatcacaggtacggttatcaagagccatcataatgtgggcggacttccggatacgatgaacttgaaactcgtcgagccgcttcgtcttcttttcaaggatgaggttcgccgtgtcggtatggagttgggtatgcaaccgcatttgatcaagcgccatccgttcccgggaccgggattgggtatccgtatcttgggtgatatcacgccggaaaaggtacgtatcctgcaagacgctgacgatatctatatgtcattgatgcgtgagtggggactttacgataagatttggcaagctggggtaatcttacttccgattcaatccgtaggtgtaatgggcgatgagcgtacctatgagaatacggtagctttacgtgcggtcacttccacggacgctatgaccgccgattgggcgcagcttccgtacgagttcctcgccaaagtttccaacgagattatcaataaggtgaaaggcgtgaatagagtcgtgtacgacatcagctcgaagccgcctgcaaccatcgagtgggagtgacatttgtcttaggtataacaaagtgtaaaatcaataaaatttaaaagtcacatgaagcaagatatgattgttatcttggatttaggtagtcatgagaatacggtgttggctcgtgctattcgtgcgttaggcgtttatagtgagatttatccgcatgacatcacggttgaggaattaaaagccttgccaaacgtgaaaggtatcattatcaatggtggcccaaacaatgttatcgacggtgtagctatcgacgtgaatccgggtatttacgagatgggcactcctgtaatggccgcaggtcatgataaggcgttgtgcgaggttaaattaccggagtttacggatgatgtcgaggcgatcaagggcgctgtcaagtctttcgtgttcgatacttgcaaggctgaggcaaactggaatatgacgaattttgtcaatgaccagattgaattggtaaagcgtcaggtaggggataagaaagttctgctggccttgtctggaggtgtcgatagctctgtagtagccgctttacttttgaaagcgatcggcgataaattggtttgcgtgcatgtgaaccatggtttgatgcgtaagggcgagtccgaggatgtcgttgaggtcttcaagaaccagttgaatgccaatttggtgtatgtagacgctaccgatcgtttcttgaataagctagctgacgtggaagatccggagcaaaagcgtaagattatcggtggtgagtttatccgtgtatttgaggaagaagctcgcaaattagatggaatcgatttcttggctcaaggaacgatctatccggatatcgtggagagtggaacgaagacggctaagatggtgaaatcccatcataacgtaggcggtctgccggaagatttgcaatttgagttggttgagcctttgcgtcaattattcaaggacgaggttcgtgcttgtggcgtagagttaggtttgccttatgatatggtttatcgccagccgttccccggacctggtttaggcgtacgttgcttgggcgctatcactcgtgacagactggaagcggtacgtgagtcggatgcgatcttacgggaggagttcaagaacgccggattggataaaaaggtatggcaatactttacggtagtacccgactttaagtcggttggcgtacgtgataacgcccgttctttcgaatggcccgtgattatccgtgccgtcaatacggtagatgccatgaccgctacgatcgaaccggttgattggcctatcttgatgaagattacggatcgtattttgaaagaggtgaagaacgtgaaccgtgtatgctacgatatgtctccgaaaccgaatgcgacaattgagtgggagtaattaggcttacttattaaacagatataaaaaggcccggtgatttatctgaatcccgggctttttatttatatacgatagattcgaagaactattttagttcacggatcttgatattacggaaccagatcggatagccatgatcttgcagaccgatataaccttctttagaaataccttcggtaaagcccgggaagttcttgaatttactgttagctaccaaatcatcccactctttgctccataaagtatactcaacaactttcttaccattttgggtatgcgttacctttccatcttttacacggattacgatcgtattccactcgccggcaggattaactgttttcggatctgcgggaagcatgtcatatagagaacctgctaggtggttcgctaatttgttgtcggttgcgtccacgttatctagtacctgtacttcgggagccgcataataaataggtttgccgggtacttcgcgtacataatagaagataccggagttgcccatcttgctcgctttccagtctaccgagagctcgaagtttttgaatttcttgttctggtaaaggatatcgccattagcgccttgtcccggttttttgccttcgccggtaaatactttcatggcattgtcttctataacccagtttgcgggcatagcggtaccgttacattggcgccatccagagaagtcttttccgttgaataataattcccagccagcttttttttccttcttagtcaatgtattcggagtttgagcgaaacaggggatagccatagctatggccgaaagaatcaagaatgatttgaacaactttttcatgttacttaaattgttattagattagatttgttaatatcattacaaatgtagcaatttgcttaataacccttatgaggattaacgtatttttaatggaaataggattattctattgatttaacacatgaatcgtatggcaagccactagtgcggccgtttccgtacgcagccggctctctcctaaagagatcggctcgaagccattctcttgagccagtttgatttcttccgggctaaaatcaccttccggtccgatgaggattaaggcattctctcccggctgatacgtatgttttaatagtggcttctcgccttcctcgcaatgggcgataaacttacgcccatcaaagggagtggcgacaaacttcttgaaatctgtcattccttctaacgccggcaaagtcgctttctgggattgcttcatggcactgaccaatatcttctccaatcgaatcggcttgatctctttacgctccgagaaacgacaattcaaacaggtgatcgcattgatccctatttccgtcgctttctccacgaaccactccatccggtccatgtttttggtaggagctatggctatatggagattgaagttccagagatcgggttgtttccaactctctaagagggtcacctcacaatgtttgggatgcgcccggctaatagccgctttataaaaagagccttgcccatccgtcaatactatctcatcgccttcacctagacgaagtacccgtatacaatgtcctgcttcttcttccggtaattccggcttgatagctatatctggtgtataaaaaatctgcatgaccatctaattttcaattctcaattttcaattacccaaggatcataccaattatagtagccgatagcacagagaccaaggctccgccgatcatagccggtacgccgatacgtgaaattaatcctcgtttttccggggctaatacgcccaatccgcctaataagataccgatagacgatatattagcgaatccgcaaaggatataagtagacatcaagatcgatttctcatacatgaataatccggcatctttccattgctgtaattggaaataggcgacaaattcgttcaatatggtcttttgtcccaataaagaaccaactaacatgatgtcttggctgggaaccccgatcaaccacatgaaaggagaggtgattacgcccagtataaattggaaggtcaagccctgcgccttaccgtccgtaatctttacaatccagtcattcagtccggtataacgccctatcacaccttccgtaatataattcgctaacgctacaagggatatgaataccaataacatcgcagcaatattcgtcatcaactttacgccggtaaccgtacccgatgagatggcatctagaatattcgagttctctttttccttaccggagatagctacatggtccgtggcttcttccgtctgcggacaaagcattttcgctaaaacgattgaacccggtactgccattacggaagccgagagcaagtgagtggcgaataaaaccttcgccgccgggtctgttcctcccaacatacctatgtaagtacccattacggaaccggcgatcgtacccattccggataccatgaccaaaaatatctccgaacgattcatcgtcggcaggtaattcttgatcaacacaggagattctgtcattcccataaaaatattaccggcggccactaatccctccgagccggatatattcatgaatttacgcaatacccacgcaaaggcaccgactactttctggataatcccccaatggtaaaacatggaaaccaaggcggagaagaaaataacaatcggtagcgaatgaagcaagaaactgaatcctgccgctttagaggcatacgggcctaataagaaagtaagaccggcatccgtgaagtccatcaacttaacaaatatcttgccacatccttccaataggcttccgacgaacggcacatataaaaccgccaaggcgaatacgatctgcatgaacaaacctccacctactaatttccaatcgatccgtttacggtcataactcatcgcataggcgatacctaaaatcgtaatgatcccaagcagacctcttaaaagtgagaccagtccgaatcctccttgttctccaatcatttgtttgtgtcctcctcttcttctcgacggcgcaactcgtctttatacattttcgcgtattcgtaattttcgtcagctatagcgtcttccaatcgctcgtttatttcttggatatccaataggcttaaccatttctttaactgggcttcgtccttaatctcatccggttctaattctaataaattgtcatcctcctccggttcgtcagcggggatggacagggtgtcttccagtacgacaccgcattcctttacaatctcctcggaagtaaagatgtcgcaatttacgcgaagcgctatggcaatcgcgtcggaagtgcgagagtccagctttatcgagcgctcaccgtcgctaaactctaattctgagtaaaacacaccatcttcgaatttgtatatgtagacttccttaagaatgacgttgaaggcttgcgcaaaagtggcgaataagtcgtgtgttaatggacgaggaggtacgatatgctccaaagcgatcgctatagactgtgcttcagcggttcctacgatgattggaattcgccgtggaccattttcctctgccaaaattaacgcataggccccggattgaatttggctgttcgctaatccttgaacccttaattttattcttgtactcacagatctgaaatttaaaattgtatacaaaagcaaaagtaatattattttcgggattatcgcgaataaatgtgattaatcactttcagtgtgtttggggttaaggggaaggataatggaaaaacggcttccttttcctatttcggactctacggcgatatacccatcgaaacgttcggctatcactttgcaaatggatagtcccaagccggtacctttggcgaattcatccagtttcgtgaaacgattgaaaacggcgtcttgcttttctttcgggataccaatgccggtatcttctacgaaaatatgtacatgccgctcttcctctcggtattcataaccaatcaatatatatcccttttgcgtgaatttgatagcgttgctaagaaagttggtaatcacttgtgtcaaccgaagcttatccgtgggaatggatatgcttttttccggtatttgcatacgaagttctacgttctccggcattaaaacttggaaagtctggtaaatcgtgcttattaattcatttagagaatattgctggaaagagaatgacatacggcccgattcgatacgggaaagatctaagatatcattgataaggttcaataacagatcgctgttcgtattgattaactcggtaaagttttcccgttctgccttactgagctcgatgtctgtgttcataagattcgagaatccgacaatagcgttcaatggagtccggtttatcgaatgttcgtttcagtgtttcattaaaaatcgggtaggtatctttcttttgctcaaaagaatggataagcacgattttcttttcttctttttcttggcaacctagggttaacaaagagacaagaaatatggatatggcaaaaattaaatatttatgtgtgtgtttcatgattcttaatagatagatcttttgcaaaggtagaagtttttttgactatcaaagcaaaaaaaatggtcatccgtcacggacgaccaatcttcattgctaaccttaaatctaataccatgaaaaacacggtgcaaatatatagtattttatgttgtacagcatgatttcgtggcgtaaatccttgatacgttagctttattttaataatagtccgtcctgctaaaggaccgttaacagttattgcttgcttttcacgtactcatcggccttctcttttacccgatcggcacgtttttgagtctcgggatggcttgagaacatctgcataaacttggacgatttagcttctgactcactcagttgtaacaatttatttaatgagttagacattccgtacggatctcgcccgtaatctatacaaaactggaaaccgaattcgtccgcctcatactcttgtttctgggaatattgagcgctagccaatgcctgtgccatgtctcccagttgagagtcggtcagtttggatacggttccacttacggctccggcggcgtttttagcggcggaggtcaagtaagcgtttttcatggcgtctttagagtcggaatgaacgacgtgcccgatctcatgaccgataacggcgaatacctcgtcatcgtccatgattttcatcaatccgccacatacgcgtacacttccgtctccacaggcgaaagcgtttacatctactacattatatactttaaagtttaagtctaggccggaaactttttttacattggcggtcaagcgttccaagcgttgtcccatttccgtatccgggcccgctacctcgttatgagtgtccatccattggatgtactcttttgccattttggctacatcctcgtcggatagagtagcggcatgcgctacatcagtcgcggcattaatcacttttttcgtattaatggtcttgccgccaatcttgaattgggcggaaactgttaggctcactcctgctaagaaagccaaggacaataagatttttttcatgttttaaattagttagttgtttgtgataaataattttcgatctgttgaaaagtagcatctttcaacaatactttcttctctttgttcaataggtataatgtgggtatcgcttttaagtcgtagatctcgtcgtttttaagcgaaacacttttgtcgtatgagttgatccaatctttaggcatgacggaaacgtgttctttccatgcgtccagatcctcgtccggataaacggctaagatctttagtttgttgctttttgaaaattcattgatcaagaaggacgattccatttgtctggttatttcttgacaagcatgacagtccggattatagaaaaataataatagataatccgcttttatattgtataatttcccggtttgtccgttcgctaatgtgtacgtgaaatcggtcgcaggcgtcccgattctgttttttaatgcgagctctagcaaatgggcgggacgtattttttccacatcgcttaatgacgaggattcggtaagatattccaataccgctatatacatttcctcattccttaagggggagttcgggtcgtatagatatttctccatcatctcggaaaagtactgaaacatggcactgtcttgttctgtttgtttcatcatcgcttttacggaagaagacatagccgcaggcgagacatagttcatcaaatctatatagttggataatgcctgctcggtcacttgaggttcatggatataggtcgtatccttgaagtcgaatttatcccaataatgtttcactaaatattcggccctttccaccgggtctgtgattagggtggggactgagaccatttcaaaggtgggtggcgctacattggattcttccgttttttgattgcgttgaccactgcatgcattgacggtcaacgtcaacaataaaacatatagatatttcatattcattcatatatttatgtttcaatccacaaatatatagtattatttttatctttgttaaattaaaacggcaaaagatagaatatcatggattttcgattaaaagtatttcatagcgtagcttgtaacctaagtttcacgaaagcgtcccgggagttgttcattagtcaacccgctattagtaagcatatccatgagttggaggttcaatataagacgcctctctttgaacgaacaggtaaccagatccgtttaactcgtgcgggcgagttgttgttttcgcatacccattccttattggcttcgtatcgtcaattggatttcgagatgaatctgttgacaaataattttctgggggatttacatttaggtgccagtacgacaatatcccaatatgttcttccgcccgtgcttgctttattcattaagatgtttccggatatacatgtatctgtattgaatgggaatagccgggatatagagttggctttgcgagatggaaaaataacgttaggattggtggaagggactacccgtcaaaatacgatgcattatataccttttatgaaggatgagttagtggttgtcactcatgtagggtctaagttggctgcttatgacgaactgacgttggaacaactttgtgctttgcccgtagtacttcgtgaaaacggctccggtacgcttgaggtcttggagggggctttagcaaaacaccagatcaaactgtcgcaattgaacgtattattgcagctaggtagtacggagagtatcaaattattcttggaaaattccgatgctttgggaattctttctattcgggcggtgacacgtgagctgatggctggacgtttgaaagtgatagatattgagggctttaaggccgaacgaactttctcctttgtggagccgcagggacagaacagcggtatggaagaaagtttcatgcgttttgccagtcaacattggcaataactttaggttattcgctataaaaacttgtgaagtaagggatcggatgaaaatatgtactttcgcgaacgaaatcaaataatgatatgttgtactaaataaatcaataattatgtttagcgaaaaacgaggtaacgtattacatggtgtcttgctgatagcccttttctcttgttccgcattctatatcgcggagttccagtttgttaaacaaatgtcattcagtccgctgattgtcggtattattttaggtatgttatacgccaacagcctgagaaaccatttgccggagacgtgggttccgggtatcctgttttgtactaagcaagtacttcgtgcgggtatcgtactatatgggtttaagctgaccttccagagcgtgattgcgatcggccttccggcaatcctgatcgatatggtgatcgtggtgcttaccatcttgatcggtgtttgggtgggacgattgatgaaaatggataaagaccttgctttactgactgccacgggtagcgctatttgcggggctgccgcggtattgggcgctgaaccggtcgtgaagtgcgaggctcataagacggcggttgccgtatcgacagtcgtgattttcggtacgctttctatgtttatttatccggtgatgtaccgtgcgggtattcttgatttagacccggagcaaatgggactttatacgggtgcgaccttgcatgaggtagctcatgtggtaggagccggtaacgctatgggaaaggaaatttcggatgcggctattatcgtgaaaatgattcgtgtgatgatgttagctcctgtgctagtggtcatgagtttcatgttggctcgaaccgccgtgaattccgtggttaacggggggaggaatggcggaggcgttgccccttctcgtggtaagatcactattccttggtttgcgtttggtttcttggccgtgattggtttcaattcgctcgacttgcttcctcatgcggttgtagatgggatcaatcaggtagatacattcatgctgacaatggccatgactgctcttggtacggagacaagtatcgagaaatttaagaaagctggcgctaagccctttgttttggccactattttatatgtttggttactagctggtggttatttgttggcgaaatatgtgcctcaacttgcataagatcgtattttcctctatttttgtgatcttaaataggtcgttgtggataagatgagtctcttatccataccgtgaaatataaaaagatggcatcaaagattacaaaaggtatccttatttcttgttggatagtatacctcgctatattaggggcggtggtaatggtgtttatggcgatagcgaatggttcaattggttatatgcctccggtggaacaattggagaacccgattgataaatatgcttcccaagttatctcctcggatggaaaggcgttgggagcctatgcgcatagcaaagacaatcgtatttacgtgaattatgaggatctttcgccggatttggtgaaagccttgatcgctaccgaggatatccggttcgccgaacatagcggtatcgatgcgcagggtttgtttcgtgctatcgtgaagcggggtatcttgatgcaaaaaagcggtggtggcggtagtaccattacccagcaattagcgaagcaattattctcgccgagtgccgataatatgatggaacgtcttttccagaaaccgatcgaatgggtgatcgcggttcaattggaacgttattacacaaaggaagagattataaatatgtatctgaataagtttgacttcttgtacaatgccgtgggaatccaatccgcgtctcgtgtgtattttggaaagacccctaaaaccttgaagatcgaggaagccgccacgttggtaggcatgtgcaagaacccttcttatttcaatccggttcgccataacaagcgtaccatcggccgtcgtaatacggttttggagcagatggaaaaggccgggtacataaccaaggcggaatgtgattcgttgaaggctttacccttggtcgtacattttacccgtatggaccataaagacggtttggctccttacttccgtgaataccttcgtctgacaatgaccgcgaagaaaccggagcgtaaggattacgcctcttggcaatctcagaaattcagtgaggactcattatcttgggcgacgaatccattatatggatggtgtaacaaaaataaaaaagccgacggagaatactataatctttatacggatggcttgaaaatctatacgagcatcgattcccgtatgcagaaatatgcggaagacgctgtccgtgaacatatgagtaaagatcttcaaccggctttcttccgggaaaagaagggacgtagctatgctccgttctcaagagacgtaagtgtcggtcaagtagacacgatgttgatgcgtgcgatgcaccagacagatcgttaccgggcgatgaaaaagagtggaatggctgaggccgatatgcgcaaggagtttgagaagcctgtcgatatgcgtgtgtttagttgggatggtccgatcgatacgatcatgtctcccttggattcgattcgttatcataagagtttcttgcgtacggcgtttatgtcgatggaccctcgcaccgggcaggtcaaggcttatgtaggtggtattgactataatgacttccaatatgatatggtgaatggaggtcgccgtcagatcggttctaccatgaaaccgttcctttattcgttggcgatgatcgaggggatcagcccttgcgaccagatgctacatgtgcagcagcagttgatggacgagaacggtcgtttgtgggttccccgtaacgccagcgcgaagcgaatcggcgagatggttacgatcaagtggggattacagaactcggataactgggtaaccgcttatctgatgagccagctctcaccttatacgtttgttcgtttgcttcattctttcggtttgaagaatcatatcgatccggttatctcggtctgtctgggtactccggatgtatcggtgggtgagatggtcggagcctatacggtatttgccaacaagggcatccgggtagaacctttattcgtgacccgtatagaagattcatatggaaatacaatcgcgaactttaccccacagatgagtgaggtgctgacggaagatgcttcctataagatgctacatatgttgaaaagcgtaatcgacggtggtaccggaggacgtgtacgtttccgctacggtatcaaggcggagatgggtggtaagaccggaacgacccagaataactccgacggttggttcatgggatttacgcctagcttggtttccggctgctgggtaggcggcgaggaccgttccatccatttcgaccgcttggcggaagggcagggagcgagtatggcgttaccgatttacgccctttatatgcaaaaggtttataaagataaaacgttaggctactcggaagacgagactttcgagatccccgagaaatacgcgaacccatgtagcgaaggtggggaggaagatagccccacgaccccaccggatacgggaggcatcgataagatgtttgagtgataataatcagactattacagttttttttaattcctcgtaaggaaaacttttgtttccctatagcaaaacaaaagtttcttcagcaggaaacttttgtttcttccaatagaaactgcagttatctttatggaaaacagaaagcgctactgatcctttttcccaaatcctttgttatactaagaattaatggttagatttgtgactgttaatcttaataaaggaggagctatatggaccgtagtaaaatgatttctcagttggaagacccgtctgaagtctttgattttcttgtgatcggaggaggagctaccggcataggtatcgctctggatgcttcgacaagaggatatagagtcgccttattcgaacaatcggactttacgaaaggaacttccagccgtagcacgaagttggtccatggcggtgtccgttatttggcgcaaggagatgtctccttggttctggaagctttgcgcgaacgaggcctgctacgccagaacgctccccatttggtaaaagatcaaaccttcttaatcccttgttatcgttggtgggaaggcccgttttatacgataggcctgatcctgtatgatgtgatggccggaaaattaggtctgggacgttcggtttgtatcggtccgaaacgggcgctccgtaccattccgatgcttcgtccgaaagggatgaccgccggggtgctttatcacgacggccagttcgatgattcccgccttgcgattaatatggtccgcagctctatcgacgctggcgcttgtatcttgaactacgcgaaagtcatagggcttctgaaggatggcgaccgcaaagtatccggcgttacggttcgagatgaggagaccggtacggtttatcaagtaagatcccgttgcgtgatcaacgctaccggtgtcttcgccgatgagatcttgcaaatggacgagccgggcaaacgcccgaccgttcgccccagccaaggagtccatttggtattggattcctctttcttgcaaagtgattgcgccattatgattcctaagacatcggatggacgtgtgttgttcgccgtaccttggcatgataaagtcgtggtagggacaacggataccttgatggaatcgccggaaaaggagccggtagccttagagaaagaaatccaatttatactcgatacggccgctaattatttggcccggccacccaagcgaagcgatgtcttatccgtgtttgcggggcttcgtccgctcgccgctccccgtagcgaaggtaaaaagacaaaagagatatcacgtagccataaattgatccgggagaaatccggcttgatcaccattatcggaggcaaatggacaacctaccggaaaatggcccaagataccctagacctagcgatacgttacatgcatattcctacaaaagattgtattaccgagcgttaccaaatccatggtagccggaagaatccggatttctccgatcctttatacgtatatggtacggatgccgacgaaatccgtaacttagtggcctcttcccccgctatggcggagaagttgcatccggactatgcctatacggtaggagaggtaacttggctggtccgtaatgagatgcctcgtactttggaggatgtattggcccgccgtttgcgtatcttattcttagacgcacgggcggcgatggcgatggctcctaaagtagcggggattctggctacggaatggggaaaggacgagacttggacctctgctcaggtaaaggcgtttaatgaggttgcctcgaattatatactgaattgacaaattgataaacgatactaatatagaaggatatgaattttcgaaataaatatgtgttggcgatcgatcagggaaccactagctcccgggctatcctgtttaatcatcaaggaactattattacgttggctcagaagccattccaacagtatttcccgaaaccgggctgggtagagcacgacccgaatgagatttggtacacccaatcgtctgtcatcaaggaggcgatggcaaaagcggatgtcacggatagccatatcgcctgtatcggaatcgctaaccaacgggagactaccatcatctgggaccgggagactggctttcccgtatacaatgcgatcgtatggcaggatcgccgtacggcggattattgcgaggaacttaaatcccaaggctgggcggaacgtatcctgcagaagaccgggttggtgatcgacgcttatttctccgccacgaagataaaatggatattggataacgtaaagggtatccgggagcgtgcggagcggggagaactatgcttcggaacggtagatacttggctggtttggaaacttacccggggcgctcaattcattacggatgtgacgaacgcttcccgtaccatgcttttcaatatccgtactttgcaatgggaccaagagttattggacttgtttacaatacctgcctcgatgttaccgcaagtgaaagcctgtagcgaggtttactgcgagacatcaactcctatttttaagaaaggcattccggtatccggtatggccggcgaccaacaggcggctctgttcggccagctctgcgtagaggatggtatgatcaagacaacctacggaaccggctgctttatgatcctgaataccggtaaggaacccgttctttcccagaataacctattgacaacgatcgcatggaaattaggggatcagacgacctatgcgctggaaggtagtgtctttgtgggaggtgccgtcgttcaatggttgagggatgggatcggcctgattccgaatgcctcgattacggagcaaatggcgaaatccgtcagtgataatgggggcgtttattttgtgccggcgttaacaggcttgggtgcgccgtattgggatcaatacgcacgtggcgctattatcgggattacccgcggaactacggcggcccacttgacccgtgcggctttggagggcatctgctatcaagtatatgatgtattgatggccatggaaaacgatattcacgccaagccgaaagagattcgggtagatggcggtgctatcgctaataacttcttgatgcaattccagtccgatatctgccgctgtccggtcgtacgtccgaatgtattggagacgactgctttgggagccgcttatttggcgggcttggcgatcggctattggaaggatatcgatgaactgaaagaacaatggtgcttggataaggtctttaacccacaaatgaaagaggataccgcccgtaaattattgaacgaatggcataaggcggtggggcgttctcagaattgggctgaataatgaaaatcatcttataggcagattaacaagttaacaaattcttaaattattatcttatgtctccatttttagcggaattattagggactatgctcttgatcctgatgggaggaggagttgtagcgaatgtctgtttgtcgaaaacaaaaggcaatggagcgggctggatagcgataacgaccgcttgggctttaggcgtatttatcggtgttgtggtagccggcccttatagtggcgcacatttgaatccggcggtatcgatcggcttggcgatcggagggactttcccttggtgtgatgtatgtacttatatagccgggcaaatgataggtgccgctttgggcgctttattggtctggctggtttataaggatcacttcaacgctacggatgatccggatgcggaattaggcgtattctgtacgagtcctgctatcaaagattatccaattaatttcttaggtgagatgatcggtacgttcgccttgatgtttgtcgtattttttataacggacggagaactaacctacgaaagcaatagtaccttgccgataggtttaggttcggtaggtgccattccggtagcgtttacggtctgggtaatcggcctttccttaggtggaactaccggttacgcgattaaccctgcccgtgatttagctccccggttcatacactttattttgccgatcaagggaaaaggcagcagccattgggagtatgcttgggtacctgttttagggccgatagctggggccgctattgccggtatgctctattatgtattgaaataatctcttgtatcatccggatcactttcggaaccgccgcttttacctcgggtgtcagatccattccgacctcgttgatattgagggtggagatgacaatgagatgggtttccgggagatcgtcggtcaggatcatggcgtcgatcatatcttttagaccgatctcgtgggcgctcatgagcgggggaaagtcggtggcgtaacgaggttggatcagacggacggtgcccggaaggttattatccagcgtggcatcgatcatgatgatacggtcatatccttgcagccaacttaataaatgaagccctcccgtgcccccgtccatcaaatggacgtgagccgggagcttctcgttttctaaagccttgataacgtgtatgcctacaccttcgtctttcagcaataaattgcctactcctaatactaatgtttccttctccgctttcatccttttttagcgatcttagtgatagtctcggcagtctcggttacctcttctttgtccgctatgtcttcctcgataaacttccagccaccgatgatggacgaagtctcgccacgttgctcgatatagtcatgataaaataccagataaatatgaacgatagcgaaaaggatgaagaaccacatcaggaaatgatggatctggcgagccatcaaatccccgcccatcaagggaactgtccatgcgaacagttgcgggaagaaggactggctcatcttcgcgtacaggccgaatcctgtgatactttgtaacaaaaatgcccagaaagttccgaaataaatcaagctagccaaggcgttatgcccgatactgtctaccggtttgttcttaatcatcaagatatctaccttgatcacctccaatacctctttccattgggatttctttaaagggatgaagttattccatctggcataacgattcccgacgaatccccaataaagccggaatacgaaattgaagaagaatacgaacgctgttacgaaatggataaaccgaaccacgccgaaccaatagctgaaataagcctccgaagcggacatgattgcgggaggatcggcgatgataaagcctgtcacgcagagtatgacgatacagagcgcattcacccaatgatagatacgtacgggtaattcccatacatacacttctcttaaacgtttcttacgactcttcatggctctattgttttttagaatgtatcaacttggtgcacatattttccttcctcgtcatacagatgcacggcacaagccagacaaggatcgaaagagtggatcgtccgaagaatctctaggggttgcttcggatcgtatatcggcgtaccgatcaaagcggattcgtaggcggacaatacgccgttctcatccctcggtgaggcgttccaagtagtaggcactaccatctggtagttctttacccggttcttgtcgatcacgataaaatgggctaatgctccacggggagcttcggccaatcctacgccttgctcatgatcgggccagttctcccgttcccattcggcactgtttgccatccgggaatccccgttctcgaggttcttgatcaattggttgaaaaactcaagggcccagtctgctgccattctacattccaatccacgagcggcggtacgtcctagggtagagaataaagcatctaccggtaagtcaagctgacgtaaagtctcgtctacgatactcttttggggttccttccctgcggcgtaagctacgatcaaacgggctaacggacccacttccattggttcctgtttccaccgtggcgtcttgatccaactatatttatcctctacgtccaataacttataggggggacgagggccggtatattccagatgggtctctccctcgtagggatgcaaaccggctttgtctccttgcgtgtatttataccatgaatgataaatgtactccttgatttcttccggggagttagcgtctacgggatgtaccttgctaaggtcacgatccaagacgattcctctggggatcttataactttccacttccccgagatcgaacaccgggtagtctccgtaagacaaatagtttcgtacgcctccgccaatcttactccatttgtctttatagacgttggcgatcatcaataaatctgggatatacacttgattaatgaaagttttcgcctcctctagtttctgctttaccagagcgagtcgatctgcgttgatcgcattggcctcatttaagtcgatgctgcaaggcataccgcctacgatatagtttggatgcggattcttgcccccgaacacagcgtgtaccttgacgacctctttctgccattccaatgcgtccagataatggacggtagcgataaggttctgttccggcgtaagtttatagtccggatgtccccaatacccattggcgaatataccaagctgcccgctggcaacgaacttctttagtcgttcttgagtggcggtgaaatacccctcggtattctttgcccatggagaaagttgctgggcaagtaaagcggcggcttttggatcggcttttaaggcggataccacatctacccaatccaatgcatgcaattgatagaaatgcaccgtatggtcatgcatgtacaatacggcttgcatgatattacgaaccatactggcgttgggagggatcacgataccccgtgcattctcgaccgcccgtaccgaggcaagcgagtggatggaagtacatacgccgcaaacacggcctacgaaagcccatacatcccggggatcccggtcttttacgatattctcgatgccccgcaccatggtacccgagctataagcgttcttgatcgtgccaccttctatttcagcctctacccgcaggtggccttctatacgggtaatggggtctatgacaattctttctgacatgatagtagtgttttattagatcgtagatttactttccggctcatcattgtcgataagctcttttttccgtatgttagttgctacggcatgtacggcgataccggcggcggtagcggctcctagagccagaccgatctgatccgccgtggcctcgataccgaatccgtgtatatcaggcatacgtttatagaacgggctgttgtcccagaaattctcctcgctgcaacccaaacaggggtgaccgctctggatcgggtaactggtgccctcgttccatttgatgataccgcacgagttataggtgctcggacctttgcatcccactttatacaagcagtagccatgcttggcgttctcatcgtcgaagctctccacgaacaagccggcgtcgaaattcgcacggcggtagcacgtatcatgtacccggcgggagtagaacatcttcggacggcccaatccgtccaattgcggcatgcgttcgaaagtcaacatataaataatgacacccgccatcacgtcggcgatcggaggacagccttgtacattaataataggtttacctttgatgactttatgaatacctttagcgccggtaggattcgggttcgccgcttgcacgcaaccggcggaagcgcagttgccccaagcgatgatcgctttagctcctgcggcggcctcttcggtgatctgcaaggcactcttgccgcctacgcaacaataagcctcgtccttggtaggtagcgacccctcgatcatcagtagataattgccgtaatactttttcatggtctcttccttagcggcctcggcctgttcgccggcggcggccatcagcgtctcggtatagtctagggaaatcttgtctaacaacaaggtcgccacgatcgggtgggcggcacggataaacgattcggtacaacaggtacattcctgtaggtgtagccagatgatcggaaggcggggtttcgtctccaaggcatttactacctgtgccactcccgaagcctccaatcccataagggcggccatggtggtacagaacttcaggaagtcccggcgggagatgcctttctgacggcactcttcgtaaacggacggtcttttattttccatatctcagcaattaagtattctaacaaatacgggggagttgttccccgcttagcatatcgatgatccggtagttaccgtataatgtcttcatcttgacccgggcttgctctccgctttgcttggtgatacgaccgataacggtcgcttgcctgccctcctcgaaacctctcataaggggtaacgcttgttccgcacggctttccggcaggatcacaagaactaatccttcgttcgctatatagagcgggtctaatcctagcatctcggatgcggcacataccgcttcaggaataggcagggcgtcttcgtccagcaggatatccacaccagcgtcttgggcgatctcgttgagggttccgcttacgccacctcgggtgggatcacgtaagacatgtacctctcctatagtatgtaacagctcagaaatcataatgtttagcgaagcggtatcactttttagatccgtctcgaatcccaagctttcccgtgcggaaaggatcgtgataccatgtagaccaatcgggccgctacaaatgacgacatcgccgggagtggcttggtctggggcgattcgtatgcccggagggacgatcccgatcccactggtgttgataaacaatttatcgcacttgccccgttccaccacttttgtgtccccggctacgatctgtacgccggcacgctccgccgcacgtttcatggattgtacgatacgctgaagatctgctagaggcaagccctcttccagtataaacccggcggtcagatacaaaggacgggcaccgcaacaagccagatcgttaacggtcccgttgatcgccagatcaccgatatctcctccggggaaaaagatcgggtctaccacgaaggagtcggtagagtaggccagtcgcccttcttccataagaaacacgcatccgtcatgatcctgctccaataatgggttccggaaagccggataaaatacttggctgatcagttggtgtgtcatgcgtcctccccctccgtgcgccagtagcacacggtctgagtcggtaaaaggaatcgggcaattcaagtgtatatccatatctttctatttatatctataataagcggcacaaaccccttccgaggagaccatcggggctcccagcggatgggtgggatggcaggccttcccgaaatggggacagtccgagggttgtctcaaacctctcataatcagaccggcgatgcattcggatgcgatctggttttcttccggacacaattgaaatctcattcgggaggaatatcttttatattcggatcgaagttgaagcccgctggaggggatgattccgatgccccgccagtcttggtcgcaaggttccagcatctcgtccataagttggcgggcggcggcattcccttgttcggggacggcccgtttgtaagcgttctctacctcataacttccggcttccaactgggagacacagcggtagataccatataatagatctaccggctcgaatccggtgacgaccatcgggattttatatcgggcggttaatcggtgataggccctgttgcctgtgatggcgcagacatgtccggctgtcaggaaaccgtctactttactttccggatcggataagatagcctcgatagcgggtggtaccgtgaatagggaagtcaatatggaaaagttcggaagtcctcggcgtatggcctctttcaaagccatgaggtggacaggtgcggtcgtctcaaaaccaatcgcgaagaatacgatttccttatccgggttctcctcggccagtgatagggcatccaagggcgtatatagcatacggatatccgctcctctcgcttttacgctcaataaatcctccttacttcccggaactcgcatcatatccccgaaagaggctaagatcacattcggctgtgtcgccaacttcaaggcgtagtcgattgtctcgaccggtgttacacagaccgggcaacccggcccatggagcagttgaagatccggcggcaacatctcttccagccgataacgggcgatagcatgtgtttgcccgccacaaatctccatgatataccaaggtcgtgtcacctttttgcggatggcctccagaagagtttgtaccttctcgttgcttctatattcgtctacgaaacgcacttttgtaattctttaaggtctttcagtgtttcctccgcttctttctcatctacaacagatatagcgatccctgcgtgagcgaggatataatccccctgtttcacatccacccattcaatacatatattctttaggatgcctccgaaatcaactttagccatggtcatttcggggatgcttcgatcgattgagataatctttccgggtaccgctaaacacatatcgtttcaatttatttaataacctcaaagatacttaatatgtttaagagggaaagataaaattgataaatattatttataagatgatggataatatctctttagtaaatacgatagtcgattcgtgtctgattagacatttattcctatatttgtgctatggcgaagaatgaagtatatgcgttgattattcaaggcttggttcaaggggttggttttcgcccttttatctaccggatcgctaaagatctggggatgaaaggttgtgtggagaatatgaataatggagtacgtatattggttgccgctactccggatgatcgggatttgctgataagtcgtatacggaccgagcatcctcgtgtcgcttatatccatcggatctcctatacatctacggaaatggatgaagatgattttgacgattttacgattacgcccagccattcagaatcggatgaggtcacgcaggtctccccggatatcgctgtttgtgcggattgtatgcgagaccggactacgcaaccccatcgaatcggatatccttttattaattgtacgcattgtggccctcgtttctctattatccgggaccttccttacgaccgttcgcagacaacgatgggcggtttccttatgtgtcccgattgtgagaaagaatatacgaatgttatcgatcgccgtttccatgcccaaccggtcgcttgcaatcattgtggcccgacttattacgcgacttataacgaggagacttatatcgattatgagaccttattgaaacttacctctcgtctattgcttggtggagaggttattgcggctaaaggaatcggaggctatcatttgatttgtgatgcctcgaacgagagagcggttgcccgtctgcgagagataaagcagcgggataccaaaccattcgctgttatgttccgtgatttggaacatttgcaggtctatacggctacggaaccgatggaggagcgatgcctcgtctcttggcgccgtccgatcgtgctgctgaggcaacggagccggttagcttccggaatcaatccgggcatgcatacgctaggatgtatgttgtcttatatgccgattcattacgattggtttgctcgtacagggatacctgcgttggtaatgaccagcgggaatctaagcgatttgccaatagcgatcaccccggaggatgcggaggcgcaattagcgggaaaggtagcgatcctcttgcatcataatcgcccgatccataaccgggtagatgattctgtattgcaggtctgcggaggacaaccctgcttgatccgtcgttcccgaggctatgtgccggaaccctttttcacggatacaaatgtggaagggatcatggctttcggtgcggagaaagtgaacacgttcgctttgggaaaaggagagacgatcctgcaaagtcaatatattggcgacttaaagaactgggagactttccggttctatacggaatctatggagcggtttcgtcatttgtttcgtttcaatctccagcgattggtttgtgatctgcatccggattatctttccagccaagaggcggaacgtatctcgaaatctctttccttacctttattaaagatacaacatcatcatgctcatgccgctgcttgtatgttggagcatggtttgaatgagccggttctcgctatcgtgatggatgggacaggtctgggtgatgatggtaaggtttggggaggcgagttcttcttttgtgaccgagcgaaataccgtcgcctttcccattttgagtatgtcccgttaccgggaggcgacaaggcggctgaggagccatggcgaatggttgtcgcctatttgtggcattatttcaaggacgaaccgtcgggtattccttatccggccgatttcgtggaacgcataggcacggaaaggatcgctatgcttgaacgaatgatggagaaaggtgtgaatacaccctatacatccagcgctggccggctgtttgatgcggtagcttctttattggggatttgcgatgtctccagccaccaagcggaggctccggtcttattggagcaggcggcgatgggagagaggaacgcttatgcgtatccagtctcggcggagggagaggaaatctctttttattctttgtttgaggcattattgcatgataagacgaacgaggtcccggtgagcttgatatccgcccgtttccatacgacattggcttccttgtttgtgcagaaagcccgcttgttgattaaacggacgaaagcgacacaagtggttatctcgggaggatgtttccagaataaattattgacggagtcgatgaggagacagttcatcatggctggggtccccgtctatattccgtctcgtataccttgtaacgatggggggatagccgtggggcaattaacgatcgcctcggtgactcccttttaaaagagatcagatatgcatgagttgtctatagcccgtagcatcgtggagctggtcgaggaacaagcggataaccggggagcctcggtggtcgaagagttggagttagagataggacatttgtccggcgtagagatccaaaccttagagttcgcattggatagcgccataaaaggtagcaagctggaaaaggcccggattatccgtcattatattgagggggaaggacagtgtagcgactgtgagaccattttcccaatgaacgccttgttttccccttgtccccattgtggctcctatttagttaaaatccttaaagggaaggaacttcgggtgaagtcgattgttattaaaaaggaatgatatattaatgaaataaaaacttaaatactatgtgcggaacttgcggatgcggagagcatcatcaccatcacgatcatacgcatgagcattctcatggccatgaacatcatcaccatcctgatgaagggatcgtaatcaatctggaacaagatatacttcaacgtaacaacttattggcggagcgaaaccggggatatttcgaggctaagaacctgttctgcctgaacttgatgagttcgcccggatccggtaagacaactttgctggaagagacgatccgccgtttgaaagcgaagcgaccgatctatgtgatagaaggtgatcaacaaacctcaaacgatgccgaccgtatagcggcgttggagattcccgtgtttcaggtaaataccggtaccggctgtcatttggaagccgacatggtcaatcatgccgttaagcatctgaatccgaaggagggagcgatcctttttatagagaatgtcggcaatctggtctgtccggccatgttcgatctcggagagtccaagaaagtcgttatcgtgagtacgacggagggggatgataaaccgttgaaatacccacatatctttcaggaggcagatatctgcgtaatcaacaagattgatctggctccttatctgaatacaaaagtggaagtgcttcgggaaaacgccttgaaggtaaatcaccatctccagatattcgaggtatccgccacgaaaggagacgggatggatgcatggtgtgactggttgcagacagagagtgcaaagtgtaaataaataccacgggttttaatgaataaatggagaaaaaaactatatttgctcccattcattgaatctaactaatcaaaatgttatgattaaccgagaattgattaatcctcaaagcatcgtagtggtgggaggttccaacaacgtacataaaccgggcggtcgtatcgtgcgaaacctgttggatggaaaatataaaggagaattatgtgtggtaaacgccaaggagacagacgtgcaaggcgtcaagtcttatccttctgtacatgatatcccggagacggagttggcgatcatctcgattccgagtaaatcgtgccccgaggtgatggaagtgctggcccggcaaaagggggtaaaagcttttatcgtgatctcagccggtttcggcgaggagacacacgaaggcggtatcttggaacaacagatgctggatgtcgtgaatgaggcgggagcttccttgatcggcccgaactgtatcgggttgatgaatatgaattatcatggcgtgtttacgcaaccgataccggaattccatcccgatggcgtggatttcatctctagctccggcggtacggccttgttcattatcgagtcggcgctgacaaaagggctgcgtttctcttctgtttggtcggttggaaactccaagcagaatggagtagaggatatccttgaatatatggatcggaactttgatccggtattggattccaagatcaagatgttgtatatcgagcaaatcaagcaaccggataaattgttgtatcatgcgtcttccttgatacgtaagggatgcaagatcgccgctatcaaggcgggaagtacggagtcgggaaagcgagctgcctcttcgcatacgggcgctatcgctagttcggactctgccgtggaggctttgttccgtaaggcgggtatcgtgcgttgttttagccgtgaggaattgactaccgtggcgagtatctttaccttgaaagacgtgaaagggaagaattgtgcgatcgtgacacatgccggagggcctgcggtaatgctggcggacgctttatccaaggggcgtttgaatgttcctagtttggaaggccctatcgctgatgagttgaaatccaaactgtatccgggtgccgctgtcggtaatccgattgatattatcggtacggggacaccggaacatttggctacagccatcgatttctgtgagaatcgtttcgataatgtggatttgatgatggtcatcttcggtagtcccggtttggtaaaactttatgatacctacgaggtacttcataaaaagatggaagagtgcaagaagccgatcttcccgatattaccgtctatcgtaacggccggaccggaagtgaagagctttgtcaagaaaggccatgtgaacttctcggacgaggtgacattgggtaccgccctttcacgggtgatcaatacgccgaaaccgatgagcacggatatccagctatatggcgtggatgtaccggaagttcgtcgtatcatagatcggttgccgggtagcggttatttaaatccggaggaagtgcgtacattgttgcgtgccgctaatatcccgttagtggaggaatatgcttcggatgatagggatgcgttgctggcttttgccaagaaggtgaaatatccggtggtagccaaggttgtagggcctgtgcataagagcgatatcggtggtgtggccttgaatatccgtggagaagagcatttattgttcgagtatgaacgtatgatgcgtctgccgggtgttacgggcatcatggtacaaccgatgttgaaaggacaggaattattcttgggagctaaatatgaggatcgtttcggccatgtggtactttgcgggttgggtggaatcttcgtggaggtattgaaagatgtgtcttatggtttggctccgttgtcatacgatgagacttattcaatgattcgttctttgagagggtatccgatcattaaaggtacacgtgggcaaaagggtatcgacgagcaacaatatgcggacattatcgttcgcctctctaccttattgcgttttgccagcgagataaaggaaatggatataaatccgttggtggctacggatagaggcttgttcgctgtagacgcccgtatccgtatagagaaataaaaaaacaagctcctttcactactgaatgctaatatacttagcagaggtgaaaggagcttttcttattttttagtcttcttctttttcttatcgggaagatactctttcagaaagcgtttgaagctacttaacgatacattgtatttctccgctatctgagcgtaagtcaagctcgggtctttcaagtctttctcgatttgttccttataaggctccaagcgtcccatttgttgactacctttcggacggcccagcaccacacctttacttctgatcaaggcaagggcttccttcgtacggatagagaccagctttcgctcgatctcagagaccagaccgaaggtaaaggccaaagtcttactgtcgatattatcctcgaacacatatccgtcgcttacgctacggagcgttacctttcgctctatacaaagcaaaatgatatggatgatctcgatcatcttacggctcacacgggatatatcggacacaagtatctcatccccgggacttaaagatttgacaatactttccagtctgcggttcgcacgaggactatttcccacctctttagcccacttcccgatctctatcttctgagattctgcaaattcccggatcacagcttcttggacctcggagttttgcttattgttatatgttcggataaaagcaattgtcataatgtatatatttaattatctccttttaataacagatcgacttacgataagttcaaatatgacaaatatatgaaacactttaattcggttggcttaaaaacaaaaaaaccaactaataaatttattagttggctctttgcggaagcggggggattcgaacccccggtaccctaacgagtacgtcagtttagcaaactggtggtttcagccactcacccacacttccttgtgtgttctgtgcttcttccttagaattgcgatgcaaaggtagaactataattttaaataaacaaggctttgcacatcatttttttcgaaaaaagatactacttttgtgccttattctgatattcaatagattattcatggatttgaacaaacaaattttatcgaggcgtccgataattatcgccttgatagcgattctcgttgttttgataggcggtggaggcttttgggtgtaccgtttggcttgggctccgaattttaagccggataagacggtctatgtctatatagatgataaaaaggattttgatgatctttgccggcagttgagtgattcggcgaactgtctccgtatcggtagctttaagcaattgagtggattgttgaagtatcctgcgtccatgcgtaccggtcgatacgccgtgaaacccggcatgagtaatttaaccttattgaatgacttgcggagaggacatcaagtagcgacccgggttacttttaataatatccgtttcaaggaagatttggcggaacgtataagtgatcaattgatgttcgggaaggaaaatctcctgcgtctattgaatgattccgtgtattgcgactctttaggttttaccccggaaacgatccatgcccttttcattcctaatacctatgagatttattggaatatatccgcggataaatttatacgtcgcatgaagcgtgaatatgacgctttctggacaccggaacgattgaaaaaggcagaggagatcgggcttactccagttgaggtatctatcttggcttctatcgtagaagaggagacggcggcatcggacgaatatccaatcgtggcgggtctttatatcaaccgccttcgtgccggtattcctttacaggcggaccctaccgtaaagtttgcggtgggggatttttctttgcaacgtatcttatttgagcatttggaaatagattctccctataatacctataaatatgcgggcctacctcccggtcctctacggattcctactatcaagggcttgaatagcgtattgaatcatacgaaacataaatacttatacatgtgcgctaaggaggatttctcgggacggcataatttcgccgtgacgttggcggagcataaccgcaatgccaaccggtatcgggcggagttgaataggcgccggatacggtaatggatctagtataaatcataagtctctcattctaaattgaacatttttcattacctttggcagctaaatagtgtgaatagtcaatattaagaaaacagatacacatggaaaaacatttatttttgggggacgaggccatagcgcaagccgctatagacgctggaatctccggggtgtacgcatacccgggaaccccttctactgaaatcacagaatatatccaaggttctccggtaacgaaggaaagaggtatccattgtcgctggagcgcaaatgagaaaaccgccatggaagccgctttgggtatgtgctatgccggtaaacgtgcgctttgctgcatgaagcacgtgggtttgaatgtagccgccgattgctttatgaacgccgctatgagcggtatcaacggaggtatgatcatccttacggccgacgacccatccatgcactcttcccagaatgagcaagacaaccgtgtttatggcaatttcgccatgatcccgatgtttgagccatccagccagcaagaggcttatgatatggtatatcatggattcgagttatccgagaaattagggtatcctatcttgctgcgtgtaacgacccgtatggcgcattctcgtgccggtgtcgtaaccagcccgttgaagccggagaaccggatgaattgtccggaagacggtcgtcaacgttttatcttactcccggcattggcccgtaaacgtttcaagagtttgctggcgtctcaagaggctttcacggaagcttccgagaattccgcatataataagtatttcgatgccccgaataaagacttgggtatcatcacgacgggtatcgctttcaattatctttccgagaattatccggacggtttcgagcatcccgtattgaagatctcccagtatccgcttccgagaaagcaagtggagaagatcgttggcgagtgtaaggagatcttggtgttggaagagggatatccggtcgttgaagagcaattaaaaggtttcttggcgaaaggcgtgacggttcatggccgtctggacggtacgcttcagcgtgacggcgagcttacgccagacgcggtaggcaaagccttgggtaaggagatccagagctattatgcgatccccgaggtggttgagcaacgtccgcccgcattgtgccaaggttgtggacaccgggatatgtatgaggccttgaacgaggtgatcgccgagtataacggtacggctaaggtgtttggcgatatcggctgttataccttgggagctttgcctcctttccgtgcgatcgattcttgtatcgatatgggggcctctatcacgatggcgaagggtgcttccgacgcgggtgtattcccggctatctccgtgattggcgattctacgtttacccattccggtatgactggtttgctggattgcgtgaacgagaacacgaatatcaccatcgttatctccgataatgagacaacggccatgaccggagggcaggattccgccggaacgggacgtctggaatctatctgcgccggtatcggtgtggacccggctcacatccgtgtgatggttcctttaaaaaagaacttcgaggagatgaagtctatcatccgtgaggaaatcgagtacaagggcgtatccgtattgatccctcgccgtgagtgtatccagacattaaccagaaagaaaaaagcaagcaagaaatgaaaacagatattatactatcaggcgtaggaggacagggtatcctttctatcgccgccgttattggagaagctgccttaaaagaaggtctgtatatgaagcaagcggaagtacacggtatgagtcaacgggggggagacgtgcagtctaacctgcgtctttccgacgagccgatcgcctcggacttgatcccgaagggccacgccgatttgatcatctctttggaaccgatggagagcttgcgttatctgccttacctgaagaaagagggttggctggtgacgaactcccgtccgttcgtgaacatcccgaactatccggagatcgagaaagtgaacgccgagttggacaagctccctcacaaggtcgtattggacgtggaggagatcgccaaggaagcgggttctgtccgtgccgccaatatcgtgatgttgggtgcagctgccccatttatcgggatcgagtatgataagatcgaggcgggaatccgtcagatattcggtcgtaagggcgaggatatagttaatatgaacctaaaggcgttgaaagccggttatgacttagcgcaaagtctgcggtaaatctttctccgggtttgcatgatatcagcgtacgtgacatctccgggtttcacgtacgttttttttaacatctaaccccctagaacttttagaagagctgtcgaggggtaggtacggcaccgtagaactttcgtaagccttagaattatgcggtttgatgagaattttaatgtatctttgtcgctgaatcctaaacgagaaatgattaaggttatgaagaagtatttattggttagtttactagcgttattggctttcgtaggcaaagctcaggaggataattccgatatcgtgaaggtcggtgatactatgccgtcatttacgattgtttccgacaacgggagtaagttgcagtccgcttcgttgaagggaaaagtgatcctcgtgaattttttcgccacttggtgtcctccttgccaaaaagaattggccgctgtccaacaaaccctctggccgaaatacaagaacaacaaggacttcgttctcttggtgatcgggcgtgagcattccgatgccgatctacagaaatataacgagaaaaaaggcttcgattttccattgtatcccgataaggaccgggctattttcggcgctttcgccaagaacttgatccctcgtggctatttggtcggaaaagacgggaagatcatttatacgagcaaaggctataccgacgaggaatttgctgagttaatgactaaaatagagggtgcgttaaaataagaatcatgaaatatagtaacatacatttaatttatttttctccgacacacacgtccgccaagatcgtttacgcgatagcggaaggaatgggtgccacttcgatgtccgagtcggatgtcacttgtgagagtctggatatggaagagtatattgatgatgagctgacgattatagccgctcctgtatacggtggccgtgtggcggagactgccatggaacgttttcgcatgttccgttctgcccaccatgcgccggtagtccccgtggtattgtatgggaaccgggattatgaggatgccttgaaagagctctgtgatttagtgtcggagcaggggttcgtacctgtggctgccggagcgtttatcggcgagcattctttcagccgcaaggggatgcccattgccgaggggcgtccggacgagtcggatcttaagcaggctacggaattcgggaaaaagattatcgaggagctggagaaggtttcctgcatggaatgcttgtccgccttggaggtgaaaggtaatttcccgtatcgggtgaaaggcccttccactcctcaagctcctgttacggataacgatttatgtacgcaatgtgagtattgcgtggatgtgtgtcctacacatgcgatatccttggcagacgagggtatgtatagcgacccgaacctatgtatcaaatgttgcgcctgcgtgaaagagtgtcccgagggcgcacgtactttcgatactccttacacggcgatgctccataagaactttagtgcgcgcagggagccggagatattcttctaatggaggaccgggcatccggtatatggtgagggaaagcgtcaaaaggcaaaagttcttttggcgctttctctttttttgtacctttgttcggatcgttaatctcaaataataccgtgtttgtatgaaaacctatttattccttttgctttttgtgtttcaagccttctccctttcctcccagattagcctgaaagggtataatcaggagaagatcgatccttctcttttcgagggacgatggaaagcccgttggatctcctacccgggtgaggctccgaatgtatatggggtctatcattttcgtaaatcgttcgatctggaggtggttccttcccggtttatcgtccatgtttccgccgataaccgttataaattatatgtaaacgggaaattggtatccttgggcccggcccgtggggatatctataactggagtttcgagacggtggatctggctccttatctgaggaaagggaagaatacgctggcctccgttgtctggaattatgccgagcgtaaacctgtcgcccagatcagttacgatcagacgggttttatcctgcaaggcaatacggggcatgaggcggtggtaaatacggataccacttgggtctgcctgcgtaataaggcgtatgctccttggaccgaatggcaggtattggggtattacgtggctggcccgggcgaggaactggaagcctccgcttatccttggggctgggaacaaccggattacgacgacaggaaatgggagaaggccgtacggggcatggagggtgccacgaaaggatcgagagattacccgggacggttgctggttcctagcccgatacctccgatggacagccggatcgagcgtctggccaagctccgccggtcggaagggatcgaatgcccgcaaggatttccttactggccaaaagctttgacgatcccggcgaatacggaggtccgcttgcttctggataatgattacctgacgacgggttatttctccttagccttcagcaaaggaaaggaggccgagatccatatcggttattcggaagccctctataagcaagaagaggaatcgaccactaaatcgtatgcgttgaatggcaagggacatcgggacgagttgacggataagcagtttatcgggtacggggataagatactggctgatgggggagataatcgtctcttcacgtccctgtggtggcgtacatggagatatgtggagttgaaagtgaagacggcttccgagcctttggtgatcgaggatatgtatgggactttctctgcctatcctttccgtaacgagaccactttctccgctccgggacatgaggagctgggccgtatgctcgagataggatggcgtaccgcccgtctgtgcgccaatgagacgtatatggactgcccgtattacgagcaactgcaatatttcggggatacacgcatacaggcaatgatttccatgtataatacatcagacccttatatggtgaagaatgccatagagcaaggacggcagtccatggtggcggaagggattacgatgagccgatatccgtctagcgtacatcagtttatatcctcgttctctctctggtggatttgtatggggcacgattattggatgtaccgtggggatgaggcatacatgaagaccttgcttcccgcttaccgtcaggttttgtcgtggtacgagcaatggttgaagccggattatagtttgtcctacgttcctcattggttcttcgtggattgggcggccggttttgattatggcgagccgatacgggagaaagagggaaactcggcgctccaagatttgatgtatataatgaccttggagtttgcggcggagatggaacaagcgatcggcctccctgccatggcggatcattaccggaagatcgctaccgagatgcgtaagacgatccgcccgaaatattgggacgctgaccgtaatctattcgccgatacgcaggatcatcgcggctattcccagcatgtgaacgccttggcgatcctgacaggggttacgaaaggggaggaggccgtaaaggtgatgaaccaaaccttggcggatacgagcttgatccagtgtacgatctatttccgttattacttgaatcaagcgttaaaggtttccggcctaggggatcaattcttggataacttacagatatggcgggatcagatggcgttgggattgactacatgggcagagatgccggagccatcccgttctgattgccatgcttggggagccagtccgaatatcgagttttaccggatcttgttggggatcgatagcgatgctcccggatttaggaagatacggatcgctccgtctttgggaaaactgaaggaggtttccggtacgatcccacatccgcttggaagcgtgaccgccgcttataaattggatgagagaggtgagggaaccgcccgtctggtcttgccggaaggtactacgggtatatttatctgggatggaaaagaaatcccgttgaaaccgggcgaacaggttatttcgttatcttcgcgtcattaatctatctaaaatcctgatatgagacgagtttattcaattgccttattgctgctggtcgctctcggtctgtcggcgacaacgaaggaagtaaagttgaaattattggaaaccagtgatattcatggaaatttcttcccgtataattttatcgagcagcgggagtggggaggaagtctggcaagggtatattcgttcgtgcaagaagaacgccgggcgtatggcgataaccttttgctattggataatggcgatatcttgcaaggacaaccttcggcgtattattacaatttcatggatacggtctctacgcatatagcttccgccatgatgaattatatggggtacaatgcgggaaatatgggtaaccatgatgtagaggctggccatgccgttttcgatcgttggatcaaacaatgtgatttcccaatcttgggtgccaatattatccgtacctccgaccgggagacctatttaaagccctatgaggtatttgagcgtgatggtgtgaagatcgttgtactggggatgattactccggctattcctgtatggttgccggagactctgtggcaaggtctttatttcgccgatatggaagagacggcccgtaaatggatgaagatcattcaggagaaggagaaaccggatgttgtggtaggtatctttcatgcgggaaatgaggctcgtaccatgtccggccagtaccgtgaggatgcgtcgatggaggttgcccagcgtattccgggcttcgatgtggttatgatggggcatgatcatcgccggtattgtggtaaggtggcgaatatcgagggagattccgtgttactgataaatccggcaagtaatgggcgtgtagtcggttccgttgatgtcgtgttaaagatggagcatggaaaggttttggacaaacaagtatcgggtgttttgacggatgtggataagttggagcctagcgaagagtttatggagaaattcgctccgcaatacaaagcggtgaatgattttgtctccgagaaggtgggaacttttacggagagtattgcgacccgtcccgcttactttgggccatccgcttttattgattttattcactctttacaattggagttgactggtgcggacgtctcttttgccgccccgttatcctttgacgcaaaaatagataaaggggatatcacgatcagcgatatgttcagtctttacaaatatgagaatatgctttatacgatgaatttgacgggagccgagatcaaaggcttcttggaggaatcgtacgctatgtggaccaaccggatgaaatctccggacgatcatctcttattattgaaagagagaaagaaaggacaggagaattacgcttcgttcgtcaacttcagttttaactttgactctgcggccggtatcatttacaccgtggatgtaacgaaacccaagggcgagaagatcacgatcttgaaaatggcggatggtaagcctttcgacgagaataaaacgtataaggtagctctcaactcttaccggggtaacggaggaggcgagctattgacgaaaggggccggcattccccaagacgagttaaagagccgtatcattcattcgaccgataaagacctccgttattatatgattcaatatataaaggaaaagggcgtacttagcccacaacctttaaaccaatggcagatgatccctctggattggacgagaccggcggctgaacgggattgtaagtatcttttcggagaatgagtttccgtccttgaagtgtctggtttgcgatagtatctcaatgggaaacggtggtaaagtcaatggaatagagatggtttctcaatgactttacggccgtgtcccattgacttttttgtatcccgtattagggatgttgctgataggttagggcgcaaggggcgcatctttacgtatgtttctaaaactttttctgtaaataacgtttatacccctcttgtctgtagagtgatgtaaatattatttttctaaaaatgtttctttgaaagcgtaaagatgcgccttttgcgccctaggatttttaccggggaattttcctgatgccttaacatgtggatatacagttgtttgtgtggttcttccctcttcggctttttgggtctttggggggcgatataatgggtccttacccacgtttacgtgatccgaaagcactaaaaccaagtgcatttcgcatgatttcatgagctaaaagccgttttttctgtgtgatttcctatcggggccaagatcgtttttgtcgttttcatacgtgcaaatgtactcgtggagcacttgttttaagtgcacgtggtgacacgtgaggccacgtggtgggccacgtgagccgagaatggatatcgacgtattactaatgtacgcgatccccctcgtgaaaaaaacttgaaaaataataccggaaaagtttggaggttatgttttataacactacttttgcacccgcattcgagagagaacgccggtacaaaatgatgaaacaaacttttagaaaaaaagttccgaaataatttggaggtttaaaataaaagtccttatctttgcagccacgttcgcaaaacgaaagcgacaaaagagttctttgagagatttacataattcaacaagtagtacaagtattaggaaaattaattttccggattgataccgtcaaagaagtatgactttggactacaataacggattccggagcgaggatataaaaacaatttaaacaacgaagagtttgatcctggctcaggatgaacgctagcgacaggcttaacacatgcaagtcgaggggcagcgggggtagcaatacccgccggcgaccggcgcacgggtgagtaacgcgtatgcaacttacctatcagagggggataacccggcgaaagtcggactaataccgcatgaagcaggggccccgcatggggatatttgctaaagattcatcgctgatagataggcatgcgttccattaggcagttggcggggtaacggcccaccaaaccgacgatggataggggttctgagaggaaggtcccccacattggtactgagacacggaccaaactcctacgggaggcagcagtgaggaatattggtcaatggccgagaggctgaaccagccaagtcgcgtgagggatgaaggttctatggatcgtaaacctcttttataagggaataaagtgcgggacgtgtcccgttttgtatgtaccttatgaataaggatcggctaactccgtgccagcagccgcggtaatacggaggatccgagcgttatccggatttattgggtttaaagggtgcgtaggcggccttttaagtcagcggtgaaagtctgtggctcaaccatagaattgccgttgaaactggggggcttgagtatgtttgaggcaggcggaatgcgtggtgtagcggtgaaatgcatagatatcacgcagaaccccgattgcgaaggcagcctgccaagccattactgacgctgatgcacgaaagcgtggggatcaaacaggattagataccctggtagtccacgcagtaaacgatgatcactagctgtttgcgatacactgtaagcggcacagcgaaagcgttaagtgatccacctggggagtacgccggcaacggtgaaactcaaaggaattgacgggggcccgcacaagcggaggaacatgtggtttaattcgatgatacgcgaggaaccttacccgggtttgaacgcattcggaccgaggtggaaacaccttttctagcaatagccgtttgcgaggtgctgcatggttgtcgtcagctcgtgccgtgaggtgtcggcttaagtgccataacgagcgcaacccttgccactagttactaacaggtgatgctgaggactctggtgggactgccagcgtaagctgcgaggaaggcggggatgacgtcaaatcagcacggcccttacatccggggcgacacacgtgttacaatggcgtggacaaagggaggccacctggcgacagggagcgaatccccaaaccacgtctcagttcggatcggagtctgcaacccgactccgtgaagctggattcgctagtaatcgcgcatcagccatggcgcggtgaatacgttcccgggccttgtacacaccgcccgtcaagccatgggagccgggggtacctgaagtccgtaaccgcgaggatcggcctagggtaaaactggtgactggggctaagtcgtaacaaggtagccgtaccggaaggtgcggctggaacacctcctttctggagcttcaggattccgtaccgaggtcatacgaggtattgatccccttgtgctgctgttgagattatgtttatatatagatcttacagaccgggaggccggtcaaaaagagagaaaatgacgctgggacgtaagtcttggcaaagttgacagtcctatagctcagttggttagagcgctacactgataatgtagaggtcggcagttcaactctgcctgggactactccgaatgagggggattagctcagctggctagagcatctgctttgcacgcagagggtcaacggttcgaatccgttattctccacacatcccgcgagggaaagaggatctttgacatgttggacatcaaaaagaagaaacaagtagagcgagcttaagatatatcaacccgtgcgtcaagtgcgaggtgagagaaagtaagcaagggcagacggtggatgccttggctctcggaggcgacgaaggacgtgataagctgcgaaaagcccgggggaggcgcaaatagcccttgatcccgggatatccgaatggggcaacccggcaggctgaaggcctgccatcccgaaagggaggcgaacgtggggaactgaaacatctaagtacccataggaggagaaaataaacaatgattccgtaagtagtggcgagcgaacacggaagagcccaaacccatgtcgtctaggcgacacgggggttgtaggaccacgacgtggcaagatagagtcaagtggaacgccttggaaagggcgaccgtagagggtgatagtcccgtacacgactgacgattgaagcctagtggtatcctgagtagcgcggggcacgagaaatcttgcgtgaattagcggggcccatcccgtaaggctaaatactcccgagagaccgatagcgaaccagtaccgtgagggaaaggtgaaaagaaccccgagcaggggagtgaaatagaccctgaacccgtctgcctacaagcggtcggagcgtcgtaatgacgtgacggcgtgccttttgcataatgaacctacgagttaccttccccggcaaggttaagtacctaaggtacggagccgaagcgaaagcgagtctgaacagggcgccaagtcggggggggtagacgcgaaaccgagtgatctacccttggccaggttgaaggttgggtaacaccaactggaggaccggatgggtaagcgttgaaaagctttccaatgagctgagggtaggggtgaaaggctaatcaaactcggagatagctcgtactccccgaaatgcatttaggtgcagcctctttatagtatatcgtgaggtagagcgactgattggatgcgagggcttcaccgcctatcaagtccagataaactccgaatgcgcgatatatatttacagggagtgagggcgcgggtgctaaggtccgtgtccgagaggagaagaatccagaccaccggctaaggcccccaaatgatcgttaagttgaactaacgaggtcggatcgcagagacagctaggatgttggcttggaagcagccattcatttaaagagtgcgtaacagctcactagtcgagcgatctggcgtggataataatcgggcataaacgatctgccgaagccgtggatgtcgcaagacatggtaggggagcattccatgcggcgtcgaagatgagggatgacccttgttggagcgcatggaaaagcaaatgtaggtatgagtaacgataaggggggcgagaaacccccccgccgaaagaccaaggtttcctgatcaacgctaatcggatcagggtgagtcgggacctaaggcaaagccgaacggcgccgccgatggaagaatgggttaatattcccatactgcctcatggagtgacgtggagacggagaagtgacagtcctgccggctgacggaatagccggttgaagggtgtagatattgattcccgtaggcaaatccgcggggagagtcgaacctgagagtatacggagcgcttgcgcaacgtaatatggacgtaaccatgctcccgagaaaatccgctaaacttatccatgcggcacccgtaccgtaaacggacacacgtggtcgggttgagaatactgaggcgctcgagtgattcacggttaaggaactaggcaaattgaccctgtaacttcgggataaagggtcctcgtcgtaaggcgaggcgcagagaataggtccaggcaactgtttaacaaaaacacatggctgtgctaaatggaaacatgatgtatacagcctgacacctgcccggtgccggaaggttaagaggagatgtcatccgcgaggagaagcgttgaattgaagccccggtaaacggcggccgtaactataacggtcctaaggtagcgaaattccttgtcgggtaagttccgacctgcacgaatggtgtaatgatctggacactgtctcaaccgtgagctcggtgaaattgtagtatcggtgaagatgccgattacccgcgatgggacgaaaagaccccgtgaacctttactatagctttacattgagtttgggcagacgatgtgtaggataggccggaggcattgaagcaggtacgccagtatttgtggagccgacgttgaaatacggcccttcggttgtttgagttctaactcctagttaggaggacactgtatggtgggtagtttgactggggtggtcgcctccaaaagcgtaacggaggcttctaaaggtgccctcagaccgattggtaaccggtcgcagagtgtaatggcataagggcgcttgactgggagacatacaagtcgatcaggtaggaaactagagcatagtgatccggtggttccgcatggaagggccatcgctcaaaggataaaaggtactccggggataacaggctgatcattcccaagagctcatatcgacggaatggtttggcacctcgatgtcggctcgtcacatcctggggctggagaaggtcccaagggttgggctgttcgcccattaaagtggcacgcgagctgggttcagaacgtcgtgagacagttcggtctctatctatcgtgggcgcaggagatttgcgaggctctgacactagtacgagaggaccgtgtcggacgtaccactggtttaccggttgtcccgccaggggcaccgccgggtatctaagtacggatcggataagtgctgaaagcatctaagtacgaagccggcctcaagattagatctccctcaagggtggttatagacgatgaccttgataggccacaggtgtaagggcggcgacgtccgagccgagtggtactaatagcccgggactttcctcacagtgaaggttgatatattttaagacgataaggcgaagctggtctcttcggattgatgtccggtcaaaatcttgataatgatattaaggtggctatagcacgagggatccacctcttcccattccgaacagagaagttaagcctcgtcacgccgatggtactgcgtaacagtggaagagtaggtagccgccgtcttgagaaaggcgaaagccggaagagagaggagtcagtcgaaagattggctcctttttttggtatatacaccagccgttgtagagatgtggcgtgccgcatcttatcctttcgaaatgtgccggattttggttaatccagcactaattttacgatagccccgtaagagggtacgttcttaaaagcatcttgcaaaggatattcgccagcgtagacccgggcacaagtcaataccccgccatgcgcgaataggcataccttttgcagctcgcttttgcgaagctcattcaagaagtcgctaacccggtcgtattgatcttgtagggattcaccgtttggagtcgggttattaacccaatccttgaaccaagcctctgagcggggatcggaggatagctcattccacgatttcatttcccattccccgaaattcacctccttgatacggtcttctctctccgcctccggaaagccgcaataattagctaagcgcacgcagcgggtaaggggacttgtccaaaccttatcgaacgtatgatcgctcaagcctttttttacctcttccgcctcttcctcgaaggtcggtttcaatggaacatcggtttgcccgtaggcgtagccggcgggaacatcgacagaggtatgtctgattaaataaatctccataattatatagtttgatagatgatcacgaaacccatatagaagcttaactcactaagaagaaaagtcgctccacagcagtctcccgtatatccttgtatctttctcttcatgaaagaggtaaggaaataccaagtgataaccgggaatatacccgctagtaagtaaacaggttggggaagccataataatggtaagaaagcacaaatgatgctaaatacatattctcgagaggtcattcggctatatacggtcttgttcttggcttcctcctctttcctcgcgtaaggcaggcgattgatgatcatgctggagacgcctttgcaaaaaggatctccagccagtatggcacatcccgctagctcgatcgggagactgcttactagtaggtagaatagtccgaagtagaaaatcagtccgattaccccatagctacctatatgcgagtctttcatgatcgccaatatgcgttcccggctcgtgccgccgccgaaaccgtcgaagaaatccgccagcccgtcctcatgcaggcagccggttatcagcaatcgggtaatcatggcgcataagatcgccacggatggcggaagaatcaaggaggtagcgtacaataccaataccgacaaaccagccgtcagccaaccgaccaacgcccaatggctcacgatattcttgaaacaggccgccggaacctccgccaaccgccagaacggtaaccgagtaaagaatataaacgcagcgagtatccgcaacatatcagaaatatttggtgattgccgcttgcttgaaactatacatctcgttgatcatgcgaacggcggagtcgagtatcgggtaagcgcataccgagccggaaccttctcccagccgtagccctagatcgagcaatgcttttgcccccaagaaatccagtatccgtttatgtccggcctcgtcgccgcaatgcccgaatacgcaatacgattgcatttccggatataagcgggaagccaccaatacgcaattcgtcatgataaaaccatccacgaggataatcatcttcagttcggcggcacgcaacatgcctcctacagccataaccatctcataccctccgaagtagcgcattacatccaaggcgcttccatcccctttgtaattctccaacgagcgtttcagtacgttgtatttatgccgtacgccttcgctgtccagtccgctaccggcccccacacagtcgatcaatgggatttgcgtgaggcaagtcatccacatgctggaagccgccgtattcccgatacccatctctccgaaactgatcacgttacagccttcgttgtaacaatccgtcacgatatcggctccgtattgaagggctttctccatttcctccacggtcatggccgcctcgtgaagaaagttacgggttcctcccttgcgcaccttgcggtcgataagttgggggataacggggaaatcgaaatccacgccgccatccacgatcttcaactcaaacccatgctggcgggcaaggtagcaaactcccgctcctccgttcaagaaattatggatcacttggcgagttacctccttgggagatttgcttacaccctcgtcggcgatgccgtgatccgatgcatagattacgttcacgggatgacgcaagacaggcgataaggtttgctggatcaatcccacttgcagggcgagcgcctcgagcgttcccaatgagcctttcggctttgtcagattatcgatcttgtcttgtaaagcggcctccagccctttgtccggggcctcgatgtgaaattgtatcatgatagtagtattttatataagtcgttgttcttattccttgatcttgacggggattccgctgaccatcaagacaacctcgtccgctttagaggcgatatattggttgagccagccttgcatatcggtaaatttacgttgcacctcgtctatcggcacgcctcccatacccagctcgttcgtcacgaagatcaagtaggcatcttgccgggagagtttatcgaactccgctttgaggagggagagagataattccacgtcgctttgattgtcgaagaagaagttagtcccccaaagggttacgcaatcgatcaccacgacacgaccggtaagatcgtggcggctcaagtatttctcttcctctatattggtccactcggggccacggtctcgctggtggcgttctacccgcttccggaactcttcgtcccagatgcgggaggtagctaggtaaaccgggttgggcgacagcgataaggcgagcctctgtgcgtacccgctcttgccggaccgctgtcctccagtcactaagatcactttcttactcatcgcctccgtgattcctgtttttccggtgggcggcacgtttcgccttgttgatcgggttgttcttgctcgtcttccgaagggcggccgatttcgggttggcggcgatccgttgcgccaccgccgatttgctcagtgcctttccgaacttggggcgtaaggcatctcgcaataacttctcctcgtcggtaagcttggcggtcttggatttccagcctccctctttctgcgccttacgggcggcagcgtatttattgaactttccgaacttctccattttagcgccttcacggcctcccttgttctcgggtttcgctttccggagcgtgccgagtaattctttttcttgctgcatctcctttttctcctcctcttgcaggcggatatatttctctacgttcaagcgttcaccgtccaccaatacgacatcctccgccgtgaccttctggcctacgtgcggttgcttgccgtttacggttacccgttccatctcgatgaaattgtccgcttcccggcgtgagcaaacaccggcttcgcttatcagtttgtttaatctaatttccatattattaatattatattattagtaaaataagggtgacgatcacacccatcaacagttccgtattgctattcacttgaatggcgatacgcatatcctcggtcgtgaaaggcctcgcgttcgtcccgatataaggcttctccaccggtttgccgaaataatcgtgcgtccccccgaactggcagtccaagaccgccgccaaggccgcttctggataaccggaattagggcttgcgtgttcagggccgaaacgccgtacgaaatcccttttcccccaattattggagacaagcaacatcaaataggccgtgaggcgggccgggatgtaattggcgatatcgtcgattagcgccgctatccgtccgaactctaggtaacgctcattcttataaccgatcatcgagtccagtgtattcaccatcttgtaagccatcatccccggcaaccccagcagggcgaaccaaaacatcggggcgatcacgccgtcgctcaggttctcggacaaggtctccaacgccgccgcccgtatctcttgcggcgacaggttcgaggtatccctcccaacgatccgcgccacttgccgccgtccttcttccgtgctacggtccacggcctcgaacaccgccttcacttccttaataagcgtcttcccggataggcaataaaatacgccgacagccgtcagcaacccactgaactgcggatgtatgatccaagcccacgacaatatcctctcgcagattaaatacacgccaaggataagcacgactgccagtataccgccttttaggacccgctcggagcctttattcaactctttctctccggcgctgatcgctttgccaaaccatacgataggatggggccaaccttccgggtctcccagcaaccggtcggataaccaaccgcccaaaaagggcacgatcttgagtaaattgatagaatgatgtaaccaatacatattgaatgtcattgaaggaacaaacttagacaaaaaaaagaacataaggaagtggtaagcgattcttcatcacacattaggcgaaagaaacctacatttaaaggatttcgagcgtagactttcatattctatcagctgttgtatgatcatccaccatccgttgcatgatcttctaacagttggtggatgatcatacaacggatggtagaagatgagtaggtacggagaaaacggctaaaggatgcctttagaagccttaaatcttcgggaagggagggcttgatatacgggggatttctttcaattttgtatttattgtcaagaaaagcgttcttacggccggttattattactttatttgctcccaccgtatcgtgaaaggagttaatcgagatgacagatgaaaaatccattttagaacaatttgccgctggaaatcataccgctttccgggaattgttcatgcgttaccatctgaaagtctattatttcgtgctgggactcgtgaagtccgagagtgatgccgaggacttgactcaagagattttcctaaagctttggacgcatcggagtcgtttcacggaagtgaggacgttcggttcctacctctatgtgctggcgaagcatacggcgttcaattatatcgaatcccgccgggtgaatctcgtgagcttggagagtgcttcggaggaagacgaggagcgaagtacgccttatgaggatttagtcgctaaggatttgcgattgttggtggatatgattgtagagaccatgccgccacagcggaggatgatctaccggatgagccgtaatgagggattgtcgaacacagagatcgccgagaatttacaactctcaaaaaagaccgtggaaaaacatttgaatctagcgttaagggaattgcggaacgtagtattgactttccttcttgttatgatatgttaatgaattgagggtaaagtgagaaaagtaggtcctataaacaagataaaatagaaaagcaggaatgagtcctataaaaaagatattaaaatactttttccatcattcgttctccggggagatggtggatcgggtacatcaacgattggcggagccgggagacgaacgggaaaaggaagaggttttacgggagatctggaatgagatcggttttccggaggcggataaacgaagcgagatggctttcacccggttggagaatacattggacgtgaggccccgtccctgtctgcgtatcccggcatgggtgcgtatcgccgctatctggctgatccctttgttgtcgttgggtgtttcttattatctatatagagacgcacgggatgtcaggcagctcgcttttatggagcggttcgtaccttccggcaagcgggagcggatcaccttgcccgatggtagcgaggtctggttgaattccggtaccttgctgctttatccatccgactttatcggggataagcgagagatctatctggtgggagagggatatttcaaggtgcgaaaacgtcctgagcaacctttcattgtgcggacgaaagcgatgcgggtacaagtgttgggtaccgagtttaatttatccgcttactcggaccaagagaagataacgacaaccttggaggaaggttccttgaagatccttcctgatgatccctcggtggctccatgtatattgagtcctaacgagcagcttgtctacatcccttcccggggaaaggtggacgtgcggcaggtggtgggctcggattactcggcatggaaagagggaggcttgttgtttaacaacgattctttcgaggatattttaaaaaccttggaacgtgtctataatgtgaaggtgcatttgcgtacctccgcttatcattccaaccggcttacgatccatttcaataagaatgagtcattggtgaacatcatgatgctgctcaaggagatagtacctggtttagagtatcagatcaaagaggatggagtctatattgattaaaatgtatatttcttagtcttcttttaaaagtgaaagtatatatagaaacgagtgtgtttaccaattagaagtaaaaactttatctcactgtttgtttgtcgagctgaacaatagatacgagctttcgataaacagtttggtgtttgtgtcctttggaatttctattactcaatgttctgtgttttacatttgttaactttgttctgttaggtgtatccttcgtattccttgtcctaataacgagtacgtactatagaaggaaatataaatgtttaactaaaaaatctaatatcgcatgaacaggaataaatctatatgtatcactattctttgtttgagtcttgctatggttcggagtttgcctattgatgcgcaaaaagtgacatttcatgacggttttatctctttaaaacaagcatttgagaaactagagtcagtctcgacttataagatagcctataatgacagtcaattggatgtgtcgagaaaggtcttgatggatcaaaaagaaatggaagtcttgttggccttatcgcaattgttaaagaatacggggtacacatataagacaaatggaaattacatacttattgtaccggagaaagcggatgataccacgaaagacagaaaaagagtatcgggtgtgattgtcgataaccaaggtatccctgtgattggtgcaaatgttgtggagaaggggactgcaaacggaactatcactgatattgatgggaaattcacgttagaggtaagcggtaatgctactcttcaagtctcatatatcggctataatacgcaagaattatcggtctcaggaaagaccgatttctccgttaaacttggcgaggatacgcaagctttagacgaggtggtcgttgttggatatggaacacaaaagaaggtaaatctgacgggagcggtgcaaagtatttctagtcaggatttaacgaagcgaaacctttccagttcatctcaagccttacaaggcttgataccgggtatggttgttacccaaagttccggagctccgggagcgacggcctccatccaaatccgaggaacgggatcgatcaattcaaatagtgagcctttggtattgatagatggagttgagggggatatgaactctgtcgatatgaatgcgatagagtctgtctctgtattgaaagatgctgcatcagcgtcgatctatggatctcgtgcctctaatggtgtcattttggtgacaaccaaaagggctaaagaaaataaattatcggtctcttataatggttatgtaggttttcgtacgcctacctcgactcctaatcccgtagatgcggtcacttatatggaggctatcaatcaagcgtgcgttaataataatcaagcccctcaatattcggaagaggtaattaatgcctataaaacttctggggcagataatattcataggtatgatacgaattggaaagatttagtatttgatgaaatcacgttaacacataatcattcacttagtgttagtggtggtagtgatgtgttaaagacatttgtcaatgcttcctataattatgaggatggtttaataccaaataattcgttcaaacgtactgctattcgttcaaacacggacgttaagctaacagagtggcttagggcgggtttaaacctgaatatccgtagaagcattcaaaaagacccgacgagtggaacaaataatattataaatagtacgttgcgttttacacctctttttggggctgttaataatgatggaacttggggaaatggccaaaatggtatcaatccgttagcgcaagcgattgatggtggggttaaggtcgtagataataatgatatagatgtaaaaggaactctcgctttgacaccaatcaaaggtatggagatcttggccagttatgccagcaggcggtatgagaataaacaagataagtttcagaatacctatgatacttatgagggtggtaattttatcatgacttatcctacgactaaatctaggtatgaggagtggtatcagttgattaagaaccagtttaacgctcaggtgacttatgaaaatactttcaatgaaaggcattattttaagggctttttgggatttcaaaccgatgagttcaaaaataagtcgtttggtggttcacgtaataattattactatgatggctacgaggaaatgaatcatggggatgcctcttcctctatggttaatggtaatagttctaaattgactatgatgtcatatttcgctcgctttaattatacttttgcggacaaatatttaatcgaacttaccggacgttacgatggctcatcaaggttcactgctaaaaatcgctggggattttttccttcagtgtctattggatggcgaatatcagaggaacatttcttcgatccattaaaagatgcgattgataatttgaagatccgtgcttcgtatggttctttaggaaaccaagacctcaaggactattatccatatgcgtctgtattagccttggatgcctcgtattggtttggagatagtaaaaattatactacaggaatttattccaatgcgttgtctaatcctgaaatctcttgggagaaatcacagcagtttgattttggattggatattaccgcttttaatacccgtttggatgtgacgtttgattattacatccgtgaaattagcgatatgttgcaacaatttcccgtgacttatgcggttggtttgacttctccatgggagaatgcgggcaatatgagaaataacggttgggatttaagcgtgatgtggcatgatcggataggaaaagtgaaatataacattagggctatgttatccgatgtaaaaaatgaggtgacggatctgtatggaaataagtatattaatgataataatacgacacaagagggattccctataagttcttggtatggatatgtggctgatggatatttccagtctaaagaggagattaataactatccagtttatgggaataataaagataatgtaaagcccggatatataaaatataaggatattagtggccctgaaggggtacctgatggccagatcacagatgcggatcgtacgattatcggtgatccacaaccacgttattcttttagtctgaatctaggtgcggaatggaataactttgattttaatgtgtttttacaaggagtgggtaaacgggatatattctttaacggagcaggagcaaggccgttttggatgggaggtactgtttacgaacatcagttggattcttggtctgaagagaatcgaaatgcagaatatcctctattattgattgatggttcaggcggaggaaacatgaataatattccttcttctttttgggtaaagagtggggcttatatgcgtttaaagaacgtgagtgtaggttattcattgcctaagaatatattaggtaaatcagggcttagtaatgtgcgattttatctaagcggccaaaatctactcacaatagcaaaaggatataaaggatatgatcctgaaggtgatgtatcatcttattatccggttactcaggtttatacatttggtgtcgatataaaattttaaaggaaaggttatgaaaagatacagattcatttatacgatttgcgtgttacttgtttttattaatatatcatgcagtgattttttggatgtagaagatacgaatccgtcttacacaaacgagggattttatacaaatgagaacgcaatcagagaaggggcaactggtgtatattcgaacttatatatgcaggttgtaggagaactcgcccatacgacaatctttgatttttatacagggctagctctggaaagaaatgagaatacgacgattggtgcgggaggtggtttaaatgcggataacagcgatatacttaaattctggtcccaactttatacgaacgtagcgagagcaaacgcatttttaacaggagtgaggccgaatatggatgatcttagtaagaagtctttacagtatgtatcggaggtccgtgtgttaagagcgtattattattatctgttaatcgctttatggggggatgtgcctttttatacagaacctcccacttccgatcagtatgaggtggaaaaaacatcaagggttaaaatattggattttattataaacgaatgtaatgaagctaccgaatatctagattggatcgcaatggatagaggacgtgttgataaatcatttgcgtatggtcttatcaatcgtatggctttattaggggggagtttagatttcggaggaaaaagtactgaatattttaaaatagccgctgaagcagcctcaaaagtgatcgggaaacgtttgctggcattgaactacgaggatttgtttgtcgtggaaggacaggcgaaagcagatgtccgaaacgagatgattttggagatgatctataatgttgatggtacgaatgttcacaggaattggactggatttggttttgtctctcgtatgcaaggacaaacgtctcgacatccgagtatgctgttggcagatacttatgaatgtatagatgggaaacgtattgatgaatctccactatatgatgtacatcacccacaaaagaacagggaccctcgtttcaaggctactttatggatgcatggagatacagctacttgtaataatggttctttgaataccgttattatcaatgcctatgatgacgagacacaacaatataattatacgactggtgaatgggaggttagaaataatgatgatataaatagcgctgcagcttgggctagttttaccaatgccgggtgtggttatattatagctaaatatagtaaagaaacatctcaaaatattagctatacaagtcaaaatgtaccaatcatgcggtatgcggaaatcttacttggttatgcggaagcgaagattgaactaggggagttggatcagagcgtttatgacgctatcaatcaagtacgaaatcgtgtagggatgcccaatgtatcggctgatagaatcggaaatatagagaaaatgcgtcaattagtaagaagagagcgtaaggtagaattcgctattgaaggattgcatctgatcgatatgagaagatggggaattggggatttagaaaatgagaaaccgatgtatggtcgtcctatcgaggaaattcgttataaaggtttgtctgagaccgatattccttattttaagaaatcagatcgtcatgatttaaatgatattcctgattatgagtcttataaagaaaaattgaaagtaagggacgcaaatcgttattgggatgctaaatttgagttatggcctattcctcaacaagaattggatcgtaatcctaaattagttcaaaataaagggtattaaaatatgaaacgacgagattttttgacttatagtttattgacaggaggaagctcgcttttgcttcctcttgtgacagcttgccaaaaagggaataagatttcctcttccatgccgattgaaggaggagcgaaagtagaggaaatgaaagctgatattgtggttgttggaggaggaatgggcggttgtgcaactgcgttagccgcttgtagaaatggtatgaatgtaattcttacggaagaaacggattggattggtggacaggtttctcagcaaggtgtaccgccagacgaacataaatggattgagtctggtggagctaccgcatcttatcgaatgtatagaaataaaatacgtgatttttatcggtatcattatcatttaacagaggcggctcgtaataatccatatctaaatccgggtaatggtggtgtatctaaaatatgccatgaaccgatggtttctgtggaggtcttgatggaaatgctaatgccttatgttagtgcgggaaaattacaaattttgttaaatcataaggctcaaagttccgatgtgcagggagatgaagtgttagctgttactgtacgagatagacaaaatggagaacttgttaccttgaccgctccttattttgtggatgcgacagagtgtggtgatttactaccactgacgaagactgaatatgtaacaggttcggagtcgcaagaagatacaaaagagctgcatgctgctaagcagtcaaatcctttgaataatcaggcttttactgtttgttttgcgatggaatacataccgggagaagattggacgatcgataagccagataattatacgttttgggctaactatataccaaatttaactcctgcatggccaggtaaattgttgagtatgacctatccgacaccatctacattaaaacctaatcatgctgtctgtattcctgatggaacaccaacggatgcttttaacttttggatgtatcgtagaattatagatcagcataattttcttccagatacttaccaagggagcacgactcttgttaattggcctcagaatgattatatgttagggaatattatagatgtgcccgagaatgaatttcagaagcatgtggatgccgcaaaagctttgaatctttcattgttatattggttacagactgaagccccacgaccagatggtggtgttggttggaagggattaaggctccgtaaaaatttgcttggtacgaaagatggaatggctaaatatccttatataagggagtcacgccgcattaaagcggaatttagaattttagaggagcatgtgggcgaagagaataggaagttgatatcaggagaaacaactgctgctgcattttatgatagtgttggtattggttattatcatatagatttgcatccttcttgtggaggagacaattatatagatttcaactctcttcgttttcaaataccgttaggtgctttattaccacagcgggtaaataatttgttccctgcatgtaaaaatatagggacgactcacataacaaatgggtgttatcgtacccatccagtagagtggggaataggagaagctgtaggtttattaattacctatgccagtaaaaagcaaatatccgctcgtattattcgcagcgataagaatatgctaacggatttccagcaatggattcaaaaagaaggagtcgagattgcatggaaaaaagaacttgtgtaaatattgtgtgttggtaaaaattaggattggagaaccgtattaatggaatcaagaaatgaattcttgttttgttgatacggttcttttctttttatgtcaagaaaatgtttttacctttagacgggcaaaaagaatcccgaatgagtgggtatggatttttttgctaaaacatgttaatagaaagttttttctttttaataatatgtatttgtttgtcagttacgaaataatcactacctttgcaccgcaaaattttttattaatcaatattaaacagcgttttatgaacaattacgaaaccgttttcattttgactcccgttttgtctgacgctcagatgaaggaagcggtagagaaattcacgaaccttctgaaagctcaaggagctgagatcgtgaatgaagagaactggggcttgcgcaagttagcttatcctatcgacaagaagacaacaggcttctaccagttggttgaattcaaggcagatcctagtgttatcgctacgttggagttgaacttccgtcgtgacgagcgtgtgatccgcttcttgactttccgtcaagacaagtatgccgcagaatatgcagctaagagaagaaatctgaaatcatctaaagaaacagtaaaggagaataattaattatggcagcaactcaatcagaaatcagatatttaactccgccttcagtagacgttaagaagaaaaaatattgccgtttcaaaaagaacggtatcaagtatatcgattataaggatcctgaattcttgaagaaattcttgaacgagcaaggtaagatccttccgcgtcgtatcactggtacttccttgaagttccaacgtcgtgtggctcaggctgtaaagcgtgctcgtcacttggctttgcttccttacgtgaccgatttgatgaaataattaattaagaggagacagaatatgcaagttattttgaaagaagatgtagtgaatttaggctacaaagacgatatcgtaacagtaaaagacggttacggacgtaactttctaatccccacgggtaaggcagtgatcgcttcagagtctgctaagaaagtattggctgagaacttgaagcaacgtgcccataaattggctaagatcaaggaagacgctcagactttggccgctaagttagagggtgtagctttgacgattggtgctaagactagctctacaggtacgatcttcggttctgtaacgaatatccaagttgctgaggctttggctaaggctggtttcgagaatatcgatcgtaagattatctatatcaaggagtctgttaaggaagtaggtagctataaggctgttttgaaacttcacaaagaggtttccgttgaggttcctttcgaggttgtttctgaataatagatactttaatatatcatgaaagagggtagtttcgaaactgccctctttttttgttttaattataaaaaaagatatctgtcaatcagcaaaaaagcgctacatttgtctccaaatttgcaataattttagaaagtgagcaaaaagtcttttctatatattaacttgctatttgcgttgttttttttcttgcccggacttcaggcgagagagaagacttttacggtcgtgatcgatgctgggcatggcggtaaggacccgggagctagaggggcgaatgttaatgagaaggagataaatctcgctgtcgccttaaaattgggtcgattgatagagaataacgcggaggatgtgcgtgtgatctatactcgtaagacggatcgttttatcgagttggacgaacgtgcgaatatagcgaaccgcaataaggcggatcttttcgtgtctatccatacgaatgccgtaaagcgtggaagtaccgtgcaaggtacggagacgtatacgctgggtttggcccgtagcgaagagaacttagaggtggctatgagtgagaactcagcgatcttgttggaggataattatcaacaacggtatgagggatttgacccgaactcttcggagtcctatatcattttcgagtttatgcagaataagcatatggagcaaagtattagtctggcttccgagatacagaaatcgttcggggcttgtaagcgggtggaccgtggcgtaagacaggctggttttttggtgcttcgtaaaacgagcatgcccagtgttctggtcgagttggggtatatctcgaatcgtcaagaagagcagttcatgagaaccgccgccggacaaaataaattggcggaagcgttgtacgatgctttttgcaaatataagaagaattacgatcgtcgtaaaggaaatatttccggagctgtcgttgctcccgtagcgaatgagaaaactccgcctccggggagcgaggctgatatcttaaataaaaaacagcaagccacaagacagaaaacctcagtttcttctaccacttccgtgaacaggaacacgaaaggaaaggttatatataagatacaattcttgacttccaataagaagcttcctgcgaactcccggttatttaaggggtacaagaacgtggatttctatgtggagaaaggtatctataaatacacgtatggcgagacttcggattttaactcgatccggaagatgcgccgaacgatcgcaaaagattttaaagatgctttcatcatcgcttttaaggatgggaagaaggtgaaatattaatgatttaggaataaattatacattataaataaaggaaatgaaaagtgtattcactaaagaggcgaagatcggacttgtgacgatcgtaagtctggcgttattgtatttaggcattaattatctgaagggtattaacctgtttcaaccggtgaaccattactacgtatcattcagcaacgtaaagggggtgacgatttccagccctgtatttgtggatggttttaaggtgggattggttcgtgatattatttatgactatgatacgaccggtaagatcatcgttgaggttagtttggaagataagatgaggctgaataagggaagttatatagcggttgtcaatactttcttaagcggagctgagttgcatatccatttgaacacttacgtggatgactttttgaagccgggttctacgcttgagggacgaatggaagaggatatgatgcaatccgtacaggagaagatcttgccaagcgttgagaaccttttgccgaagatcgacacgatcttgggtagcttgcaaaccttgatcgctcatccggccttggctcaatccttgaatcatatcgaaaaaacgactagcaacctagaggtgtctacccgtcagttgaatcagatgttgagtaaggatgtaccgggtatcgtgaataacttgaagacgatgacggataatttctcggaggtgagcgccaacttgaaagaattggatttggctacaacggtcaattccatcaatgcgaccttggcgaacttgaagttgactacggataaattgaattcgacggataatagcatcggcttgttgttaaacgacaaaggattgtatgataatctgaacagcacgatggacaacgcctctaagctattgcttgatttgcgggagaatccgaagagatacgtgcatttctctgttttttgattatgttaaaaaatcatagcataaaagacgttatttagaatcattctaattagacaaaaagttaggggactcctgctgattatatacataaggcctttaggtaaagtgagatagatacttcctgaggccttattccgtcaccggacgtcagcgtttacgcttttgtagaggtctctaaaataaagggtttttgaacattggtcgatctaaataacagtaaatcagataggtattagtaactgtctgaatctaaaagggatattgaaaattcatatttaccaaacaaaatagcactttttttttcggaattaatttctaaactttgtagtccgaatgtaaaaagtattagtgggagagaaagaaaac

SEQ ID NO: 3 - DNA, 99834 bp, Parabacteroides distasonis
  source 1..99834: mol_type = genomic DNA
ctgattttataggttgtcgtattatgtgatggagcaaatctatgaggttactggccgtcctccgtggaggaacagatgccacacgagattttcagatcatcgttccaatccttgttttccgaaagttcgacgttcttcagtttccgtaccttgttgcggagttcatcgttactcaggctctcgacatcagtcgtatcgccatgaaagtaacgatgcagccatagagtgtacttgtgcccttgtttgtcgttgtcaaagatgctccggagctcctttacctggttcttgtcaagaatcaggcgtaatagcctcatttgtccttccgtgaatgtcccttccgtagatacatatacaagattgaggtcgtttccggaatggcgtaattgatagtgggagatacagtctataaatgactccccaatgtagagaatgtctatcgggcggcttttgtcatggttgctggtcgccagacagtcgaacttgccaccgataatccctttgaatgtttcatttcgttgagaaatggcttgcacaccgttttcattgtacatcttgatgcacacgttgcggtaaacactccctttgttctttacctcacggataaagaaagtgtctttgaagaaccggctttcaatgctttctttcaggatacctcttttctggagataattgcccttgtagggttgtagctggctcaagtagaattgaagttcgtccgctctcatgcttgtgttacctacttcataccggcttttttcgggtgtcgtgatgcggttggtgttgatgtagttctgaaggatctcccccacctcgcgcaaggacggcatttttccggttgtttcaaatagatgttcctgcatcagatccatgatactgcggccacgcacgctgtcactatgcacgtcccaataggtgtattggttctgcgagttccgcttgatgacgatggtatgcgttccgttgctcattttgggacaggagttggaagagccttccacgattttccatcctagttccagcaggaaatcgggcagagaaatggttgtttttatctgattgaaatcgactttcataacgttgactggattagttgaatctcattttatctgagcttagattataaatgagaaagattatctttcataaagataagaaatatcatctaaatatggaagagaaagtatatgttttttgattcgtctgcatttttatttcaaggtactgtaaaccaaatcaacagtagtgtctataccgggaacggcctccaactgtttgctctggttgaatacgctttccccgtctttttttatctgcatggtgatgatagcactctcttttgaatagagaatgccttgcacggtaatttggctgacaggcttttccgtgctgtattccgctttatcggtgaaactctcatctacggaagctgcggaggtaccggtgcgttcgttcctgaatctcacgccgtcaagattatatatatgcacactgcctttgggtgaggaaccggttacggctacggtgatgtgatacatgccggctttgtctgtttccgattggatttcctctttgttgcatgaagcggccaataagcaggctgccgctaataatgaatgaatttttctcatggtaggattcttttgttgaatgttatcggatgattttttgttctgtcttgtgtgtcccggttggcggaactgctgacttttcttttaatttgtcctctatctttttgaggatggcgttgacatcttcaatgattttgatgtagttctgctggataatctcttccaggatttccagttccatctcttctttgccgttgcccagtttgaccggtaaggagaaacggggtatctccttctcttcaaaacggcacatatccatctgcacgctgaagaatggcggcttgcctccggcaatcttgccaatgaagtgtccggctgcttgtccggcaatgtcccttgcctttaagactttttctttttgcaggctctccgtgacactgttattgccaccggcttggtgtgaataagattcttgcgcttctttcttctccccaagcaagttctcgatgtctttggcggtcttctcatttccggtcataccgtaagcctgcgttccgcaggaggctttcaggatgttggcacttttctctccatagtccctgaccgcttggttgaagtcctgaacggcgagaatggtagcgacattgtgcttccgggcggttccgatgaaagtgtcaatgccttgcaacaggatggtcggaaattcatctaccatgaatatgctggtcgctttgccgggattgttcatctgtgacatcaagacgctgccgatgcaggaaatagcaggggaaacggcttccttgatggtgggcgcattgcctacgcataacagcgttgggtgttccttgttggttatatccaaagagaactcttcttcgggaagtggcgacaacacccagaagatgtatttgttgttcaggagtaccaacggagtctgtgcggatgatacggctccggctgtctgctgttgtgcacccagtttccaggcggtcagcatggaggacatgttcaatgcgatttcaggatcttccgacagccagtggaatactaggttgctgtcagaaagggcaagggctatcacatggggcagcgtacagataccaagcttcctttccttgaaacatttataggcgattgaatagacgtagttgatggcattgttggcccaaaagtcggtcttttccttccagcttgcttccagattcttcatcagtgtcatgatgatattgcggatgaatagcgattcgtttccctttgacatgtattgcggagaaagtacgttcaccctgaccgtgcgtgacatatccacaaagttgatataggcgaaacggggtgtttccatccccttgttccggaaatgttcgatgcttccgtatgcgatacgtgagaggatgggtgacttgtccttggtgggatcaccctcccaatcgtacacgaatccggcatagttgcgctcggcgcactggtagatgattcccttgatccagctctctgatttaccgcttcccggaccgccgtcgatatagacattctgctgcggcttatggatgaccagcggcccggaggcggtttcaaagcggaagtagaaagccgattcttcccggcttaacccgaaaatgctatcatcggattgggcatgacgccggatgaaataaggcagagtcttgatgacaagcagcgtgtacgctacgaatagaatgggaaatacaaataggttataccacgctgataaccggctgaatccgacaaccagcatggatgccgtaaccagtgtcatactggtgtaaacccatttcttgttttcgtctttcactttgccaaccggaaagagaaaagcgaggcctccgatcaggataacgtagagaaaccggaataggatatccttctccatcagcctttcccacatggccggattacgtagtggagcgtataatcccgtaacgatagcccactgaaacagtacggctgtcccgatgagcgtggatagcaggatcaggatgaatgacaggtctttcttctctctttccatggccgttgctgttattggggttgtccggatgccgttccgtcaccgctctcttttttctctgcctttcccagtaactcaatgcgtgagacggtcaggctgacggatgggatgtggctaccgtcatccttctggaatacatcggcatacacatcgccgcagacatatacctgtgtcccttttttcagatactcaaagactttactctcgtaattcacgaaacagcatacccatagggtctgttcctcgttgttcacgttcttgtacttggtggatacatggaagttgaatccttttccgttcttgttctgccgggcatccgcaccgacataaccgataatttgtcctgtaaacataatgatggtttttaaaagtttataatccgagctgtggctcattcatatttttcatggctggctccgcttccatggaaggcagcgaaatgccgaaagtgctgtgtagcgtttcaaggttgtcggctgtaggatggtttgccgcaacactttccaataaccgtgatgaaggggtaaaaccttcgtttttcatctgctccaataccggacggttgtcttgcaggacggcctgcgtgaaccgttcctccggtgtgaggtactgttccatccgtgcggtatgttcctgaatcatattgctggcttttcctacatcggcaaggatgttgtagatgaatttgggatcttctttcaaggctcccagccagttttttagatacatggcattttcttcccggatatgggtggatattcccaggctttgcccgacggtagcggaggtgagttcggcaaccagttcctctttggcatattgcttgtctccgaaaatcacgcctttttcccggttcagatgctcaggttctccagtcgagtgcgccatctcatgcagtagtgtggagtagaaattctctccgtccttaaactgccccttcaggggtacgacgatatggttatcttctccccttgcatggtaagcactatttccttccttggaataaatggggcagatccattgctgttcccgtaccatcgcatcaatcagaggcacggtgagcatcccttgctcgtccttgatggccggtatcttgaattgctccttcaatgcttcccatttctccggtttcgtttcctgaagattggtctgctgtacgttgaacacattgtatgtcttcagaaacggcgtgaccttatattcctgctgctcgtttttatccaggttcttatatacgtcgaaaggtattttctttccgttcttgtctcttactgagaaattccagtaaatgactgggaatgacttttctcctttcagtatgttaaggccgttgtctttggcttgcatgaaggtcatatagaccggcaggctgtactgctctttttccgaaagtagaaacaacatgaaggaatttactccgttgtaggttcttccctcgatattttgcggaagtcccccaccctttatcccgaaccaaggcttttgccagttgtcttccacctgctttatcttttcgatcatcagttcggcgaaacgctgtaatgctttatcacttgctgtatccatgatttattggtatagatttctgttctcgtaatcaagcagccattctctggccgtttggttgtttgtctcttgctgcttggcagccatctcttcttgataggcttgtgcaagctcttcctgtgcaagtagaaactctaagtcactgatttctcctgcaatgtttttctgtactaattcatcgtaatccataattcctgattttttaggttataagtcattgaaagcccggttgatggtgctggctatcggacgggccatttccttgctgttgtcgggtttgggtgtgctggccagtttgacatctcccagtgtctttgtgctgccttccatcccgaaaatcttttgtacggctatcagtgtgttggcttgcacacccgtttcacgcatccgggtaaggtcttcttgagtgagccggtacccttctttctgtatctcttggatgacatgaaagttgtcggtctgtgcggcatccaacagacgtgcggcctgcctttcatgttcgccctgttcttccggcttggtgccgaacagctggatgacttcatgggtttgcctttcatccagaccgtgttccttaccgattcctttgataaactcttcactgggtttatatccttcctctttgagcttcccgattttttcaaagtcatgtttgcccaccgcttccttaaactcggcttccatattgcgcccctcttcgtgtttttgctcttttgcagcttctatgttggccgcatgggcttccagtttgggggtcatggccttgatcagctcttgtgccttgccgggagtgatactctgtatgttctgtatcatgactcctttcctgtcatccgtcagttggatgtcggcaatgaagtagccttccggactgtgcagcagcttgttctccagtgcatggccgttggcgagcaggtatttgtcggctttggttaacttgtagccgccatattcgctggtctgcccgatgatgtcgggaatcttgatttcctggttggtgcgcaggatgacggagttcagatcccggtcaacttgcagcaggatgtccttcttatttacggtgatgggtacgatgtcaccggcaagcagctgttctttctctttcttgcccaacttctttcccagcaccttgtccgggataaccaacgcctctttgcggtagaatacggagattccgtcatcgttgaaacggagcttccccggtttgccgtgtatctccatcaaatcagacatgacacccttttccagcttggtgcctttcccgtcgaggatgttcccttgcttgtaggcgtattcatagagcgactgtccggtgtagcataccttcaggcgatggtcgatgacggtaaagccgtccttgtcatgtccctttaggttctcccaccgcttgatgctgatgccatccttctccagctcggcgacatatttaggatcattggcacgttccttgtcaaaaagggcggatacacgttcttttgattggtcacgaaggctttcatcgtactttgctccggctttttccctgatttcgcttacgctcatgctcagctcttccccgtctttgcggaaccggaaatatccgtcccggtattcggtctgatagcccagtgattcggcgatgccgccgaactgtcccacgttgtcgaacatataggtgtctaatgcttctctcagtttcatggctgtggcttgtataagggttctgcggaaaggatgtattcgttcaacacggccagcttgatgtgccgcccgccgtttcgctcgtaaatctcgatctcgaataccttatcatcgggtatcgtgaatttgtcgaaaccaagtatcagccggttccggctcttgcccttgattttcgtatcaaaatctttctgatagataggttcgatggtcgtttcttgctggatggcgttcttgctcttcttttggtcacgctggaaacatttgacaaactcgatgtcgtagtcgatgtatgatttgtttttcaggtcaaagatgaaaaacatgaagtcctcatgcacatacagattggccattgacaactcaaacttgttctcgatgacccccaggctgtagatgttgcgcttcttggtgcgcagctcttggatgcatctttccatttcctcgctgttcacatccacatgggcggtatatttgcgctggtcatcaaaattgtaggtgaatacggaggtattgccccgtttgatggtgatgtggtaagtgttcatggccttatccaccacaaacaggttggaatatgccacggcatctttggcggttgatactttcaactggttgttgtaggcggccagagtgaaggacacctcgttgccgggcgttccgtaagcgatgtcctccggaaagaagaactcggccagatggaggtcgctgacttctgcctgatagtcatggtgctgccatttcccgttgtcctcgtaaatgttcgggtacgaatccgtgccgccttcgggaaggtagcggatgtgataggtgtaaacgcttccgtcgatgcagactacggtcaggttggtctcttcggtgaatccttccgcttgcgccgagagcctgacgatatggggcgcctcttctacccggctggccatgacaagctcctgttcgccgatggcgatatcagatacttgcacaggaaataccaggtgtttcacacagtcgaaagagataaagatgtctttttggctgatggcttgtttccggggagtgccgttttcctgagcgaagagcggcagactgcacacaaagcagtaaaacagtagataaatatatttcttcatgttgtcgatatgttaaacggttcttgaaaaaaaggcggtgaatacggtaatgccccatagaagaagcagggtaatgccgaaagaaacggtcagcggacggatttctttaaaggctcgtccgttccggcgtgatacgtagatccgatagccgaaaaagaccgctgacagcgcaagcaggtaattgagaatgtctatcataatttgtctatcaatgtttgaaggggatgatttttcttgttcgttttctcttgttccatttgctcatagagcttctgtaactccgcttgcacggcttgcctacgcaacttcgattcctgactctcttcttggatatacatttcgtagttggacttgagatgtaccttcacttgtgagaggctcatgttcaagatttgcttggctacctgggtggtggcgttgactacgctggtcacttcgctggccatcgtgccgatggaagagagcggcatgtcaatgttctgtacaagaccttgttccatacgcttggctgcactggctttcaggttattgggcaggttcaaaccttccatggcatcattgtcgaagacaaccaccgatacgggattgaggttgtctcctaccttcaggttgctgactaccacatcgaggcggttggctcccaaagtggcgataccgtaaaacagcgtgttggccggtatcttcatgccggatagggttacgtcctgaagcaaccgcatccgtaccgtactgcccgtgactacggtctggtcgccgtggatgcaagccctgaagaggttgctgtttcccggtgcggaggtcggttggcggcgtacccgcttgccgttttcggcatggtagatcgggcctttttgcatcaggctgtcggcggatggatggccggaagggttggcagcggctttctccgtttttccctcttggtcataattgacaatccgttcatacatgcgcttgcggtatttgtcggattcttccagttccttgcggatgcgtgagttcttcttggcttcccggataatctcgttgagcgcctgctcgtcctccagtccgtccagttggctttccagctgatgagagaagcgtccgttccggccacctccgtattctgccatgacttcgctgtacggatcgttctgcatacggcggatgcgctccagtgtggcacggtcataccgctcctgctggttttgcagctcgaagtaaaaatcagatcctttgacctgagactctttcaggatgcgtgccttctcctgctcttccagtttgtcctgcttataggcttccatcttgtcgttcaccttgtcggccatttccgactgtggttccaaaaaggcttgcgaggcggcctgtctgtcactccctgacggcacgttcccgtcctcacggatgaagaatacataaaggaagaggatgcccaggattaccgggatggccatcaacagcttgttcttgtctttgataagtttattcggttccatggtcggttggtttagaggtttctgactggttttcattcttgcccggagaagctgcctgcgatgtgttggtgccgttgctttccacgggttcggaatagcggacaatccaatcttctatcttggctccgtgcgcattttcctcgctgcgggacagcatatcatagatggtgaactccgcttcgatattacgtgagatgcttccccgtgcccggtacccggtctgcgtgaagattatctttccggaaacgggtatcgtttgtgtgttaatctctacatccttgatgcgtaccccgtaacggatattcttttgtatgagtgagttcagcatattcacatcgttgtactcgttcaacagctccttccccttgttgcctatgaggttgagcgcaagcgaaatgttcttctcgtagctgctctcgtcaaaggcataccagtgggttacgaaggtctttacatggttcatgtattcgtattgccgcatatcgctggcagacaggctgcttgcctcatagacttctccctgcctgtcgatgacgagagcctggccgtatgctttttctattttgttgataaggaagatgatactgctggcaaaagcgatagtcagaatgatgcagtacccggctgaaagccggatagtcagcttgaccgcatcatctgctcctttgaatttcatcagattcatagttctattttttattgttgtcgtttatgaaacttgccccgatagaggcggcaccgcctacgttggtcagcttgccgcctgccgctgcgcctcccatcagggcgatggtggccgccgtggtgacgattgacacggttttcgaaatgattttcccggcatcgctgtgtcctacgattttggaggatagccagaaacagctgcaataagcaccaatcagggcgagatccattcctaaatattgtatctgctgcgtagctgcgtccaccatgtcggcactttccgtatagatggccttgaaggtctgccatatgatttggttcagaatattgatgacggtgaataccatacaggcggagcagagcgtaccgaaccagatactcaactgtttctgaaagaccggcaacatgcttacggcaaagacaaacgggccgagaatgaccagtagcttgacaatgaccacgccgatacccaagatgactacttgtatgattcctaccaatagggcggaaatgccatgaagcacaagggtggcgaggttggcggggttgagcagctgcacaatcttctccacgctggagcgtacaccggtcatttcgtcctcttccatctttttatccagttcgtgctgcatggcgccggtgctgtcttctccggctgctacctccgactggaggctgtgtttgtcgtattcggcaatcatctctccttgttcgatggctgattgtgccatgaactgggcaaattcctgcgcacgctcggaggtcagcgaggtggcttcgttgattacttccatcgtgcctacgatggtttgggcgatgggggtgtatatgcttaggcagaagaacagtaccaggcaacgggcgatttccatcatgtcgggaaatttgtcctcattcgggcttaacagctggctggctccgtgatagagatagttgtatgctaggttgcagataaagcagatgacaccaacaccgaaggcgatgactgtcatttgcgaaacgagttccatcgtcagaccgtccgtgatctgaagtccccagagaaaattatcttgattcataacgctttaattggtgtgtcgtgtgaaagcggccaaccgtccctggtaataggtcttccggttatgccccttcatggatttgtaaatgaccgtggaacgcacggattcgttaaactcacgcatctcttcggcggctttttccaccgattccttcacctgctcgataaaggacatgcgcccttccgagttcatcgagaagtaactggtcacggtggccaccttgaacagcaggtcggtactcaggctcagattgacggtcacacgctgaaagttgagaaatttcaggcagtggtaattcgatcctacgttcaggtaaaagctgtagtcgctgctcaggcaggctacgtcgtccagcaggtcggcaagctctttcaatgatttgagttccttcaactggtcgatcttttgcaggccgagccgcagttcctgggcatcgatcatttcattgatttgtgtaacccatttcttgacattggcgatccattccgttgagttcagcagggtgtggccgggatcatgcacgacgaactgggcatgaacactgccggttcccatcagccctatcgaggcggcaagtccgagtatgagaatgattcttttcatgacggttatttgttggtgatgaataatagggtgaatatgacacataccagccaggctgtcagatagctcttggcattttcctttttcgtggcgagtgcccataccacgaaaatgagcgcaacgcccaaaagtgcggcggcaatgcttccggcaagattgtatgcgctgccgttgaagtcggttgaccagcctagaagggcggtcagcccttgggtggcgtcatccatactttttcctcctttcctccagatagcggttgatggccgtataggtcgagccgctttcgttgaacaactgcttcagtcgtactactgtcgcctggcgcgaatcgaaggctacggcggcgaagtcggacacctcgttgcggaagatgaaggcatcgttcgacatcttgatgaaaaactctctccagcgttccgtgcgctgcaacgactcgatcatataggcctcttcgtccgtgatggaaagcacggctttcacttccggcaggttctgccggtgttctgaatggtcgaggataatcttggtcgcgcagttgatgatgatggagtccttgatactggacggcatgtttttcaaaaacaggatgttctgtgcggccagcgtgatgcttccctcctttttacggaaggttcggtacaggtaggcgatgaagtctccgaatttctcgtcttgcaggaagtcgagtgcttcgtcgatgattagctctttggcaaacccctggcgtttcttgattttatccacgatcatttgcagggtgatgatggcaacgagtggaaagtactctttcttagaggcatcttccatatcgaaggctatcagccggtcatgcacgatatccacgttctcggtagcgttcagcaggaatgacagctctccgtccgtatagggttccagtaaaagcaacagctcctctatctcgaatttctgtttctcaaactcggtcatccgtttgctgaacacttccttcagataagcccggtaagttatcagcgtcgggaagatacgctcatgcttctctcctattgaagaattgttcacatagtcgtaaaatccgatgacggatttcctgagaatggcgttttcggcaggcagcatgggttcacgtaccttccaaatgtagctgataatggcgacgatggtctttatctggtcatcggcagactcggcatccgtggtgtcgatgtacaggtatttgccgttcttgtcacggtcacacaagaaggggttgaacgcaaatttcttctgctcggtagagtcgaagtatttgccccggttcaaggctatcatcgagcggtaagagccgccgatgtcaatgatcatcacatcccggcccagctcatagctttgcaggatgtaattgttcagccagaaagatttaccggaaccggacgggccgataacgatgcggttcttgttgttcagcgccggataatcccagaggtttatcttggcgggagtaccgaaacggtcatggtagatatgccctttctcgtccgaaaggtacatcccctctttttgcagatagcagatggcctgcttggtcgtgttgacgaagccccggtaattggccctggcattgccgggtatgttgcagaagaacaggttgcacagctcggcgttctccacatagcacgaactttggttcataaagctgaagccttgctgtaccagtgcggttttccgcatgagcgaggtgcggtctgtatcgttcagcacgacattgaaggcggtataggcggtctggtagtcgaactgggtaatctcatcgcagaaggctgcctgctcgcgttgcttctctgccgccggagggtagaagttggtgatgtagttcagcgcgtctttctccgcaccgatggccgttacggtggcatctggatcggttatctctatcacgatgtttacgatgtggttgaacggcaggccaagtcctacggggtacagcatcgagcatttgctccgtatgctgtccggtatctctatgtttcccccgtatgccttcgacttgccggtgtgcggcacggccagttcctgaagatgctcgccttcgttggtcagcgaaaggatggaaacgtgctgctgccctattttcatgcttccgctttcactgacagccatagggttgacgctcttctgcgtggcatcgttttccggtgtctcgtaagagaggttgacgtagtcgtagatggcgttgttcagttccgtatcatccatcttgcgtatctcaaactgctggatggacgacaaaccgttctcaaagttcatcagaaaggcttccatttctgtcagccgttgctgatattccttataaggttgcttgaacgggtagtgcagctttcgcatcagcgaggtgcccgatgcgcttttgcgtatcttaccgtttcggctgccgttcgtgaacgtcacatacaggttggtgtaactgttcagtatctccttgccgttgaaatgacggttgttctccgctatcagggcattggaagagtattctgcatgatggtatcgccccgtatagtagaaattctgctgatggatgaccgtgcctgccggaagcagcttcaaaagagcctccaaccgctcatggatgtattgcgcctcgctttccgacaaggtgaacacttcgggcagaagcagccggtagccgacggtgatgtcaccgttcccgttgatgacggcgttctccgtgatggtctggataggcaagacactttccagatccacggatttgtccttcacctctatctctgtctgccggatatacagcagagcaatcagcaggcacagcgcacagattagcagggatatgagtatgatgattcctatcatggttgctgttttaggatgaatttgaaaatctgccgtttgtccgttatctgccggggggtggcgttcttgatccggaggccggtcaggtagtccgggttaccggccttgtgttcctttttcaaggtttggaacagcagaccggatagaaacagaatggcggaaatgattccgatgatgagtatcgggtgcagctgcttgaatatgctcacgatgatgatgatggccgtcagcagcatgaagatggcgaactgtcccgatgacagaccgaagaacttgatcggcttgttgattttacgcatggttctcatggctcttcgtttttagataatcaggaaggctaccatgatgactaccacggcgatgatccagccgagcaggtattccttggcatggggattgttcgtggcaagcgaatagatgacaaagaccagagcgatgccgagtaccgccgccaaaatgtatttggctacgtccagaatggtgtccgcaccctctttggctttgtctgtcacttcggataggctgttaatcttcaggccgctttgtgcctccgccacttgtgccgttcccaacagcgtgaagaatatgagaaaggtgaagataacctttccatagcggttaatgacttggttcgctttttctcttacattttcgattgctttcattttgttcctattttttaattaaacatgaatcgttttcagtctctcccattgcacatccttatacttgatggatatgggctcttctttcggctgttccggcagtggtttgcctgagtagtagtaggctcttccatgcaggtacatatcggctatctcggcagccaattcctcttcttccagctcaggctgaaataccacgcagatgaccggacaggctctctcctgcccttccttgcgcaccgcctcccttatcggcttctctttctcctttccggaagaaagtgctttcttctttttccgaaagtaaaagtgaagcgtgacacaggcgagtatggcaaccagtatcaaatccactacgttcataagagttgccagataatgagccaagtgaccaatgccgtgatataggtgatgatggcctctttggtgcgctcgtggttgcttatcagctttttaagtaccgctagtccggcacatagaaagcctacccctatcagcatggcgcctatttcacggtataaggagatcaggccggatacatttgtatcggctaacaatatgataataagcatggtgatatgatttgtcggttagtagagcagtatctttattcctacgttccagacagtgttccacttgtcaatggataggggattccaatgttgttgtatgcgggcaagcaatgccgttcggggcaggatgaatacttccagttccgtttccagtttcgggccgatgatgaagttgtattccttatcggggtggcggacgtattctgtaccgatgaatcctcccaggccgatgccccagtaaacggatttcaggttgcaggccagggttctgtaataaccgccgtccacaaaaaagtccttacccttgtcatgtatcgtttcgggaatcgtttcttccgggttcaaggtagagacttgcggtaggttggctgtatattcgtaaggtttctcaaaatagctaaacccggctttctaatagcttgtccggttgatgtatctggaaaaggacaggttgtaatagttgcctgcattgccgaacaggttagtgccgtagttcaattcaagtgccgggatgttctcataatggcgttgcgcaaaagcgcttacggtgcataacagcaggctaaggctgatagcagtcagtctgatgtgttccatgggaattactctttaggttattaatgttatatatttttctatttgtctcatacggtgtttccaatttacgcggattcctgtcggcagaaccgaatcaaggtgcttatcgcgttgttttcgctccaaacatatagattatatacgggaggacaaattttatgaagggcttttaaagggcctttcgtgtttatttaatgtgcattaaaaaatacatgtgccgtaaaccggcaggtgtggaataattctacagaaaaaagccggataggattagttgtgtaaaactgtcctgcccggcttatagggtttggtttatatgcgctttcggatgttgctcaatgcttgtggcgtgatgccgatataacttgctatgtcttttaagggtattgaacgtaacagccatttttcattggccaaaagcgctttgtaacgcgcttcggcatccagtgtgtaaaactcctcttcccttattattttgcggttgatggatcttaccaaatgtattctggccagcttgttgaaattgatggataactcatatagctgatgaagatcttttttgggcaatctccagatcttgcatggctccaatgccttgatattgtagtgggcatggtgttcttcatgtgaaaggaaaaaattgatgaactctttggcttggataaaccgtgctgaaatctctctattctctttgtccggaaaccataaccggacgatgccggattccagataatagaggtagcatacttcctcgcccctggtgacgaggtgttctccctttttgatatggataagctcgaaatgagcatcaagatacgccttttcttcgtctgtcatccgcacgtgaagatgggcgcccattaccatgagcgtctcatctatcagggtggcaattgtttgaaccattgaatttgttttatgtttatataagggtacggaaacgtaccctctaacatggacgtggcgttccaacaacaaaggcacgccccgtaccagtttcatactggtacaggcatgcgcctgttgttgttaattccttaacgatagatgccactcttttgttagacagacggacgtatgtaaaaagcgggctgccaattttctgacaatccgctgcaaagatactattttatggtttttgttccaacttttagggatttaagttgacggcaaggtcttctggacgaatgcctactacctttatatagatatcccggtagatgttctccttaatctccttgtcctcttcagaataaagccatgcggtaaattcatgataatattcgccggttcccaatttaaagaaatccttatattgataatgtctgctcacgggaatgcctttcttgtttaacaagaagcatgatttaagcgcatcgtgatattgcgaggtcagtatcgcctttatcttttcgtcgaaatattccaatgtttcctggtcaaagaaaaactgtacggtgtagggccacttctccccttttcctttgatgtactggtattggaatttggttctctccagctttttgttgataccgtttaagatgctggtcaccttcttcttccggtcatggttgtcctttaccgttacatcaaattccttggcaagttggtcaaccgtaacggtgaaataaggtgcttgtccttggtcaatcttatacttgatcaggtaaatcattttcgccaggttcagataaaacttgcggtagcctttgcggttgggcaggttacggtagtctttcagttccagcagattgtattcggtaagcaaagtattcatcagatctttgctcagatgcacgttgtaattccgcttggtgcgctttttcgtgccgaagttatcctttatctcaaagcggtccagtatttgaatgaacttatattgcgtcttgccgttcatggcgtatgctacactgaggttggatgtccctaaacggtataacgccgcttcaaaggtgttctctatcggatgctctatcttttggccgttctgttcggtgatatataccggacgttggttgctgaacaggaaatcaagctgcttctcggtcagttttcgttgcaacttggttcgttcataccccatgacctcacaaaaatcgttgatggagaaccagcagtcgccgaacagatctttcatttgtgaagatgccacgtaaatgataatgtcagacatgacagtgccgcctgcatcaaatagaacttccaatactttcgtgttggaagactcgctgagagtcctggggactctgctcaactctttttgtgtattactttccttcataggcggacacttgttgtttactgatgcaaagatacgtttttttacggagatagtgaatctaactccctataaatgaagattccaaagcatttttttcgtgctgtttcttgatttagttgtgtaaaagtgtcccgactacggctgtttccgatcccccagttgtgtaaaagtgtcccgaatggccggtttagttgtgcagaagtgtcccggattcctgatttagttgtgtaaaagtgtcccgaatgcagattctagttgtgtaaaagtatcccgactttcctgttcagttgtgcagaagtgtcccgaatagtcggttagttgtgcagaagtgtcccggttacgagaagatgccagtaagtgctaacttgcaataatatagttgattatacggaaaacctcccttattagttgtgtaaaagtgtcccacaaatacttaaatccctaaaaacctaaataaaacgaagaaatgattttgttaccgtattcttactttcggaaaaaattttgaggtggaaacaagtagaggtttgaattctttaacatattgtccaggataataggcaaagggatttttccgcagttgtgtaaaagtgtcccggttcaatgccggccttcactaaaacggtgtgcaaaaataacgcctgcccgacggatgcagtcgaacaggcgtatatatttttccgaaagtagaatcagatgctcatatacttcttcagtatcgcttgaatctccttgttatggctggtcaatatgtcttcaagaatgttgtttgcgatgttgtgcattcctaatccagtggccatagcaatctgcttcagctttctgtgggtttcgctggatatccggattacttcggtgttctttaattttcgctcttccagatattccgagaatttttttccgcagactttgctttcttctgtttttggagaagactgcacggaaggtttggattccggcttttccatttgttccggctgaggttcttggacggtttctttgactggagccgattctttcacctcttcatggatggggtgctcaatcgcaggttgggggatagtgctttccgcaacacttccgatctgctggatttcctgctctttcttactggcgctttgcagcaagagttttctcatggcggctgatgatgtcctttctttgttggttgccatagctttattctcctatatggttacagattaattccaatacctcttcacagaaagcatcacagggatgatggtacgctttactcagcgtacttaaattgcgttgatagtcaacccttgaatccttgatgtagttttgcatcaactcgaaaggcaaggtttttttatttttcaaaatttctttgaactccagcacattcggaagaacacggttcataacaccacgcacggtagtctttttaccaatctttcgacggctttcgataatcccttcatagatgttatagtaaaaggtcaatgtaggtcttaaatcggtctggttcggttcgaagggaatgatgatcacgtcaacgaagtgcagcgtttcaactacaccgttttgtttcaggttacccggaaaatcgacaagtataatgtcgtaattgtcctgaaggaaatccagttggttgatgaactctgaggaagagatattgataacctcatattcttcttcctttttcatgattccgtcctcggcttcgtcctcacgtaattttccgatagtgttctgcatgtcgtcgatatccaccacggcaatggataagcccccctcttcgtttgactgcgaatgaatataacctgcaaacaaagctgtcagcgtagacttccctaccccgcccttgggattctcaaaagctacgactactcctggtaatatttgtcccataatgtacgtttttaagtatgtgcgcaaatatataaataataaattaaataattgcatacttttataattaatttattatacacttttttacttaattgtataagtaattacatatataaatataaatataaatatgtacatacttaatcttataattaagtatgtatgttcatactttgtaataatataattagtaattatgtattttgtaactaatggctttccgttcgcctgttacaatgtgcgtagttactttgtaacaaagtgagcggttaatctggattaagaaatcaagacttttgtctggttttgtttcacagctgagtattattgtatatctttgctaatgcaaggtatgtttttgtgggtacaaaaaaccttgcgacagccgagctgccgaccaatgttcgttacactcacatactctgtatatatgaaagagaatcgagatataagtataaagatccgcttgacggaagccgagaaagaacagcttcttcaacgttcaaaggaagagggaaaatccctttcttcctttatcagagagtctgccttgaaaggcagaagcatatcgaaaaccgatgtgcaaatgatatatgaacttcgtaaaataggagccaatatcaaccagcttgccaaacatatcaatacgcttccgtccgatgaaaatatattgtattcattggatcggattaaccaatacctttcggatgtagaaaccattaaccggaaattgttatgatagccgagatacaaccttctttctcatcccacctgtccatgagccggaaaattgaataccagctttccaaggtcaaggaaggaaacggaaaagtgctttacacctccactggtgacgaactggccgccatgccagcctacatgaaacttatctcccagttgaatgaccgggtgaaactaccttatgcggaatttattctgagcctctatccgggagaaagcctttccgatgaacagtggctttctcttgccggggaatatatcgagaggatggggtacggaaagtcctgttatgccgttgtcctaaataccgacaaggcacacagccatgtgcatgtgctgctgaccacaattgatgaagaaggcaaaagcattccttccggaaataattacagccgttccgaaaagatctcaagggaactggagcagaagtacggtctgttgcctttggaaagggaaggaggcaagagaaccacgttgggagaggcgcaataccgtaactattatttcgatgcggccttgaagaaagccatgcgtagttataattacaaggataaggtatcggctgtcctggaacaatccgatacataccggtctttgaataaacccttgcaagaaataaaattggccaatgaagaatggcgtgtcctattgggggatgaaagctatgacaaccttttcgcattgctggaaaaaggaggttttttcaaccccttgttcaaggatgaactgttacaacagcttgaccgcatctactctttttccgaaagtacatccgatttccgaaggaacctggaacaagaaggattgtatatgcgtctggtcaccaagaaggacaaatcctattatgtctatggcatcaaggattcaggcttttacctgaaggacgtttcacttcctcagaaatatcgttttggtaatattcgttttgatggccggggcatgagcgccgatgaacagaagcattatctctatgaccatgtgtttaaggcattgaacgcttctttaggctatgaggattttaagaaaaggttggcggaagaatcgatccgtgtgacggaacatgtaaacagcaaaggcgcatacgggatttccttttatatggaaaacgtggaaaatgctcatgtctttaaaggtgcggatctttcccgtaagctcacttatcagaatatccagaagcatttcgatggtgtggctgtcggtctctcgccacatatcgatagggtaggggagttccgtgagcgggtggatcgtgaggctttctatatgcagggtgggggagttatggccattccggaacttgacattaccggcagcgggaagaagtcgcaagaggatgatctcataccgtccaaaaagaaacggaaacgcaagagtggtcccgatttctcattatgatgaatactaacttaatatatttgctttatgaattatcagaccgttttacagaattatcatcccactgaacagggggatttcatgttgagatatgagataggtggccggggatatgtcgtttactcaccggagaaggatgcgttgtcttgtattgaattacatggcttttccgagcttactccttggcaattggcttttgttctttccttggatatgcagcagatgaaagaacaggacgagctttctctcttcgtatgttgtaagcgagaaaagctcttgtcttatcttttcgatgtggaggaaagcgaaaccgtcttgaagacaaagcacgtgtccggttggcagggctatctgatgatggatatccataagccggacagggtacggaacgtgttccagttccatccggaaacgaaagaagcccgtttggtctttgataaccgtttatgtgtcgcttcccttcgtgagaaagaaaaaggaaagctcatccatctctgttggagtccttctgtctttgctgccatcgataagggaggagagcgtaccgcaccggcttatctgttggcttctgatgctgccttgttgcatgggtatgccatgaaacagattgcggaatgctttgccggtacaccggttgaagaacgggttatcggtattcatgtaggggataatgtctatgaggccttgtcttttgtgtgctattacgtccgtaacgtgcaggatgaatatttggttattcctgagcggaaagatgggatggtgattcttgaaaccccgaaatggaatccgatacgccaggctaacttcgtggcttcactgaacaagatggcggttgaccaggcgaagaaacgctatccggaaatggaggttccgaatgaacggccattcacgtgcctctcttttgcccggaagtctttcgtctatttcccggatctgaaggtgtatcaggaggtgttcttgaagatgtatttggggttggtgaggttacaggaggtgcatttgctggggtaaggaacaattgcagtgctgcttataaaatagtggcactactattgttagagtacttctatcattcctttggttacggcatcggccagtagtctttttacaatcctgccactgggaggattggttatcccaagcgttatctcaaccctgtttgatagaggatgatagtgcaggtattggaggatttcatcttcaatagtcatgttataattcttttatcgggacaattttgcctgatatttatgcttttgtttattgttctgtcccgatagagattattttggatggacaaagaaacgctatccagaaatggaggttccgaatgaacggccattcatgtgcctttcttttgctggaagtctttcgtctatttcccgagtctgaaggtgtatctggagatgtttttgaagatgtattgggaattggtgaggttacaagaggcgcatttgttggaataaggaaaagggtgcatctaatgcccaatttgaaaggatcacctgctacagataactgtaacagggatattatccttaaaaaagtgagttagatacaccattttaaagtgcttctgttatttctttgtttacggtgttggggaataatctttttattactcagttatagggaaaataggtctgatatttatgtttggattatatactttgaggataagtgaagaaagatatctgaaggtggattcttttatttagagttccttttagaataagatttcgccaaacagaaatatatttagaattgtttctcataaacctcaatgctgcaacattgaagtccaatctgtaagcttgatatcttatacatttattcttatttccaacttttcatatagcacaactgcctttatcagaggcagattctccttgcagaaccatggaaaatcgatacatctgaaatcgacatggctctcctccagcagattgagaaaacggatgtcgtctatcatcccttttaaggaaacgaacaggagaggtatcttttttctttggcaaaaaaatagcgccttctgtagttccgcatatgcgatggcttgttcatccttgctagtggaatcatttctcttgtcaaaaaaagacaactggacttttaatgaattatgttgttggaggtattccgccagctgttgctgtgcttcaggagagctggcatctccatacagtattatatcactatattgcttcatatcgggtatttgttccggttgtacgctccttttttccaaaggcacccctgcatattctttcaatagatgctgcttcgtgatctttcggggtttctcaacggagtagaatgcatatctgaatataaactgagtccctttcttctgtacggattcctgttccaggaaaaaagaattcaggcgtatcttgttttcttgaaggatatgtttgggaatatcttcctgatagatatcggtcatgtattgaaggatggtctttttcattagaaaaatcaatgaaaaggttcattaccagtatttataataagtttttccaacccattaatttttgcgtaatgctgtttctgcggtttagaatctgaaaacgaagctactttcgcaagatcctgtgtccggtatatatacttacttacatatggatagtgatattttatcattttaccggcaaatacattccgaatgttttccacattgagtacaatcttgatcttgttgataataatcaatgctatagattatcatttctttttcaatatggatatcaggttgcctaattgaggttcgataactttcttgtaaaccaacttcattcttttgtcagaggttttaacgaaggattttaccatttatagtcaaattgttcaatgtcttcttctgcaagtagatttccggactgcacctcgatgaacgtcaattcagagatagccctgactgcatgtttaacacctttcttgattgtaatcgtatcgcctctgctgataaccgacctgatatcatcgagtaccagttctccctcgccgtcgataaacgtccagacttcatcgcgatggcggtgtacctgatagctgatactcttaccggatttgattttcagttgcttggtaagtgatttgtaaccgtcggaaaactcggcggtatcgacaactttgtattcaccccagcgacgttcttcgaacattggccgatgttgtaggcagtcagcgtaagttttgatgttctcgcttttatctttgtccgaaattaggattccatcatttgatgctgcgataactagattccgtgtgccaatgcacatgattggcagtccaagttcgttgatgacgtgggtattttcggattcttcatccatgacaacattgcccatggtgtgttccgatagttcatcagtcaacgtattccatgtaccaaggtctttccactctccggcaaaaggtacgacggctaccgactgcgctttttcagcgacttcgtagtcaaaactgattttcggaaattccccatagcgagaacgaatttctgaaaaagtgtcggttttgatgtgtcgggttacaatatctgtcatataccccaaccgaaaagcgaatacgcctccgttccagaaagcaccctctgaaataagtttctcggcagttatcatatctggcttttccgtaaagcgtgatacttgaaatattcctttgttctgtacatcattgactggcactacatatccgtattttgctgacggatatgtggggttaattcccatcaatactagttcggctacattgtttttcactgcatccgctatcctgcgaatcgtttcaaaataacctgtttcggtataagggtcgcaaggcatgacgattataatctcatcggtggaacattttcgtttgtaggccaaatacgagcttgcgagagcgatagccgggaatgtatcgcgacgctccggttccgtaactacaggaatctcttctccaagctggttgatgatgatatcccgttgtgactggcttgttgccacagtaatcgaatcacagatgccggtttctcgtaattgccgtaccacccgctgcaccatcgactctttcgagccatcgggcgcagtcaacagtttgataaattgttttgaccgtgtattattggaaagcggccataggcgtttaccagaaccgccggataacagtatgatttgcatagatgttatttaattcgatttttaatttgccgatagtattcttcaagcatcaatttccaaaatttattgcgttcgtaacgtgatgtaatcattgcccttgcattctttgccattctttttacctcattaggattatccaaaaaatatttcatggctttatacaatgcgtgttcgtcttgtggtggaacaattattccatttttgttttgaacaattatttcattacaaccattgatatctgtaacgatttgtggtaattccaaggccccagcttgcatgacaacattagggaaaccttcacgataggagggaaaaacaaaagcctcacaccccattagatagggacgaacatcttgttgaaagccgacaaactcaatgtgagaatttgtgctaatctcttgttttacccaatcatcaaccggataaaggttttcttccataaagccgattaaacgtaatcctatgttaggataatctttctgtaatcgaataaaagaagctactaattcattgattcctttctcataaaatatacgacctacaaaaccaaacgtgaaatcgaaagttgaaatcttaatatcttgtgtagcatttcgcgaatagaatgccgtatcaattccatttgaaccaccattaccgataacaagcatttttttaggattgccgatccccattgaacaaataatatcacacatcttttgtgaattgggatatacatttgtggcacaagcgtaagttaaccgttccgtaaaacgaagaatttgtttttttatgcccgtagccgtcgtcaatgggaagcctgttaccgtgtgcatacggatcggcacacgtgctatccatgctgctaacatacccaaaagaccagctttgggggtgtgcgagtgaacaatagtcggcttctctttgataaaaagttttaccaattggaaaagagttattaaatcgaaaatcggatttatggctcttgacatttttaccggaatacaacgtgcctgttgcttctgtaattcctcccaaccttctcctttaggggcaacggcaatgacatcgaaatatgcggaaaaataattcaattgaccttgaagttgccggacttgaaaataagctgaatttgttattttgaataatttcttttttttcattgaaaagattttattttttttgcaggaactcccccataaatagagaatgagtcaacacttttattaaccaaactatttgcgcctattatacatcttgtatcaatgtgaactccacataaaatcctcactccacaaccaatccatacatcatcatggataactaccgttttttttaggatttcattatatttaataggtaaattaaaatcagaataagtgtgagtacttgttagtattgaacttgaatgggcaatagacacattatttccgatcatcaatcctccgctacattcaaaataacacatcggatgaatactgatattatctcccagttctagtttctctatgttagatatatatacattttctttaattacaacattatcaccgcatttttttgctagatttttcaccaatatgtatctaatcacaataccaacttttcctccaatacctcttaaacttacaaataaaaaattattaagtttcctaggaagatatgaatctactataacgaataccttaattaatggtttaatccgtttaaataaagttctaccgcttagatccgacatgtctaatatctatataattgttttttttatctttcatatgaaacaaatagccaataggcataaaaataatataactagaaattcctatttgttttattttatttttcattttcaatttagagcaaggagcaaaacgccagtaatttatatgagcttttattttttttaaatatggaatatctagtgatgccatttctgaataaattctcatggcataattaggtgaattcattctgtttttgattgatgaaacagataaaccgtctgataaatactctgcgatgtatattttttcattaaaaaataacataaggtaattttttccaatacggtttagaaccaaactttctgcacaaaatttttctccgggtatatcgtcaaataaataatttctcaggactgatgttttaaaaacaaacgcaacatccccttttatattttttataatccaatagttaatccaagaatcttttaaaattttccatgtaacctctttccctatacgagaaccatctggaaagcatttcataccacaaactccagcaaatttatcattattctttatatattgataatgaaaaactattcgttctatagagtcttttgttaaatagtcatcactatctacaatataaaataattctccttttgcatgtaatacgccattgttgattgctctatgttttccaccattctcttgtttgatgaaacgaattaatatacgatcttcattttgataagattttataatttcatcaatatcatcagtgctcccatcgtcaacaataatccattcaaaatttttataggtttgagacaacaaactctgatatagatttccaattaaattcttcctattatataccggtgtaaatacagtaactaaatctttcataaaaatctttttctattgttttgtattttattttatccacattacataagtgaacatataataacatagaataatccattttattcgttctccctggttatttattaagttatcttttagcaagggatatatcaatactataggataaagaaaccaagatagataagcaaatctgttattatacggtacatgaatggtcaatagccagaacgcattacttgctatataagtattaaataaacggataaacaatttgtcttcgtagcaatatgtatagatatatttcactcctgcgataatgggtatcaaactataaataatgaagtcccagcgaaatccaatattagagaacatttgctccatgcctttataagacgtattcaaatattcagacatccttttatcctgttcaaaccaaggaatgtttgtcaacaaagtggagaaagaatcacgtgcaacaagcataagcaggaaaaacgttccccataagtataagtagtgtttgggattatttgaaagtcgggtcagcaagaaacagccaattggcaacatgacggattgatggaaaagacatgctataatccaaacaggaattcgtttaatatcgttgtttggaacaagaaaagagaagataactaacgatgtagctattccgttacgcagtccatttactccgtatccccaaaaactcaaagaacaaacgaacaacactagtgctacagcatattgttgtttgaatcgtttctttaaagcaaagaaaacaggcaatatatataatgagcaaagaacaaaccaatacccttttaaattgacgagttgtgaaagccaataggtaagatactcaaaaccaatatctctatctcttatagcaaccgtaccatagaaggctttcttttggaaagccatggcataagctgaagtatctccaaagtagtgataatcggtcggtcggaaagttacatgaacatatacaatcaagagtaaagcaaggctaaatatctggttgttgatataaggctgtcttactgtttctgccctgaccggttgaatagcgatgtaaacaactaatagcagcaacaagttgtaatataaggctatatatagactaatactcataaaatgacatcacaaatttggtccacataatgttcccacgtaattttagcttctatgcgccgacgtgcattacgaccttcatttatagcaagagatttatcgtcgattaacttaatgagtaaattctccaattcttcgtgggcgtcctgatgtatcaaccaaccgccattattctcctcgacagcatcgggaatgccacctgtacgagtacctataacggcggttccacaagcttgcgcttcggcaaaaacaagcccgtatccttctacattcctattatccgcttcttcacgtgtacagagaatgaatatatgcgaggctgaatagaaatcgcaaagtttattatcatcaatgaaaccttcaaatgatacaatatctgacaatcctaaatcggtaaccatccgctcaagtgcactcttatattttcctttacctccgagatgcaatcgcacttgttgcttatactttgccggtaaagaagctatcgtccggataataaaatcatgtcctttaaatttttccaatcgagaaatagaacagaggtgtagcaagccatccttatatttttcacaagtagggcgaaaatgaattgcatcaaccgctaacggaatagcgattgttttagcatttggagaacaatgttttactaatgtctctgtataatgactgttagcaatcacgcaagaggcgtttcttagtataaaacgtcgataagtaggccaaatacagcgtcggaaaaaactctttccggcaagatattcggctccatgtgccaatatataggtttctctgtttgacaatagagacagcattccctctggatgataattcccggtaattacaatatcaccgggaacagtttttttgcgtaaatacttcaatgtacgcaactccaatattcctcttcttccatgcaatctcaccacattattatcctcctctgcatcggtagaagtactttggggacaaatgactgtaacattcagtccttttttctctaaatattttttcagttcaaaacaaagccttgcaataccaccattacttggtggataatcataggttacaataaaaatgtgtttgttagatgtttgcataatgagtatatttaggagttagttttccttttttataaccttctttataagtttttgcaaaaagtctaaacagtccgggattgcggtaagtaaaagcgtatgatgcaacaagacgcaacaaatagatgtaagcagtcggcctatgataccatttgagatgacggctaatcaataaagcccggttatgtactaatgaagcaatatagcgattgatatccagaaccctgcaaccgcctgtatcagcagccaagtgccatacatgagcatcataattaaaaaaaactttgtatccaagttcctttactcgtaaacatatttcggtttcttcatatagagcagctccataattcaaatattcatcaacaccaccaacttctaaaaatatgtctttttttatgctataatttccacctccgccatgatctacatattctttatgattaatgtggaatccccgttctggagttgccgtatagaaatggaacttgcctacatttttcgatttgggattattcttatatttttctgtaattccccctgccactactgcgatatcaggttgtgacaagaacttgtaatgctctttgagcaggttgcagtcacactcgatatcatcatctagaaataggatgtaggcgtattgtgtgtgttgcacaccgaaattacgagcttcaggtagccctctaaattcagtcacatgatagtacttaatcaatgtatcactatcttttgcacgactatacatagtactgtcaatggctgccgattggtctacaataattatttcatacggctccccaaaatcttgctctattaagcaatcaactgtacttgccagataatcagcccgattaagtgtgggcaaaataatgcttatccctttttgcataaggcgtttatgaataatatgaatcaagagttaagaaattaatcacttcgtttaggaattatactctatcagaaatttcactataatgaagcatttctatattttacgtagttgtactgaaatgtttgactttcttcaagatggcaatacaaaaaaagccttaactccccttcgtatgaatatgtgattttataaataaaaagtccgtttaaattttctaataaagcagttgagttaggattcttctacatgatgtttggagctatctcttataactcgattgtaaaattcgatgttttgtgccactatctcgttggtgttgaatctagcagttgcatttagataagccctgtcggcttgttcacacctataaatgggattcgagattagccgttgcaaagcctctgcaaattcatcgatacgtttcaccctgcatttgcaaacacagttactgtctcctataatctcttgaaaacaatcgatatcggaacaaacaattgccttccgcagtaacattgcctccagtaagaccaaaccgaaagtttctgcatggcttggaaatatgcaaatatcggcactgttagcgtatgacatagtcttgtcataaggtaagcgacctaaatacgatacacaaccgatcgattgctttgaaaagagagatttgcatttttcccatgtcgaagaaccattcactactgcatcctgtccgatgagaatgagtttgacattgtcgttttgctcgcatatcctgttgaaaataagaggcaaatcaagtaccccctttttctcaacaattgtcccccaataaagtatcgttattgtatttttgttcatgtcactagatgaaagagggggcatgtttatatccacaggattatatattacacattttctcttattcgaagacagactgaataatttatccgtcaggtcgagagcctgtcggctaactcctatataggcatcagaattacgcaaagcattatattccataagccgtacgttccatggagttttgtttccagacaaatgatcgaaatacacatttgaaccatgtaatcttgtaactactggtacagataaactacaaaaagccaaaggtccctcccagtcgatagattcaacgaggtcgatgccaatctttgccactaatagatttaactttttatttagataccttctattgataaaagaagaaaatggagacttatgaggctggtttataggtatcacagatataccatcgtcccacacagtttctgtaaacttattgccccaatacacaactgataccttcacaccagtctcactcttaacgataagatgagacaaatgtttgataaaaattccgattccgccacatttcatacccaatatcggatattctgtagttaaaaacgctatatgcatctctattgtattttttggaaaatatcaatgaaagattttgtttgttgcgatgccaagtaacggcggcaatattctttgtttgccgtcattggaaatttttcgctaaatacttgtttgatgacagtaacaccttgctgaggagtatctataaaaatacctatgcctgcttttatcaattcggttcgtgcttcgctagtcatgggcaccattgctaatacaggcacttgtaatgcgatataatcgaccatttttgcgaaattagtccaccataaagccgtgtgtccgggaataagtactgctgcttttgcattaactatcaattcatacaatttacgctgcggtacatgattgatatattccacgttgttacagattcccaaatcattgacaaattcttccgtttgtttttgattgatattcttattacccacaattttaagggtgcaacccttgccttttaattccttagaattgacagcttcggcaaatattttcaagaaattatctttatattcatggaggtattcacccacgaatattatataattctctttttctctattttgaaaagaaggcaaataatcatcatctactccagttggaataaaatatgatttatttgagtatcgtccctcatataaatcattaaatatattcaggtatgctcccgacagaccagtaatagcatcagcgtatttaaaagtatcttgttcaattttcttttgcttggcaaaaacaggaaaataatcagaatacattcgcttagcgtatgtggtaggatccctgaaatcagcaacccattttactccggttagatgtttaagtcgcataccgattctatttgaggtaaaaggcaggcaagtggtatatatgatagatatatcatgttctttaattatttttcgtcccatcctcacggcacttctttcccagaatctaaagcggtcgggaacttgaatccatcggtctagtatatatttataaaacttaccgaataaagattgcttgttagaggtgactgtatccgtgctttttgactgtgcaccaatagtttttgctttggctgtaatggctttgagtgaagtatcttctcctccaagcaacattctaaggccgcgcaatgtcggttctatataattggcttgataaataggcacgtcttggacttcgtccaacaaatcaggatcttctaaatatagataattacgattaaccgtcagtactatcggattccaacctgtacgtttaagatattttacaagtttaaatgccctaaataccgcagcatgagtctgtggcggaaaaaaaggagtaattataagtatgtttttattcatcgttttaatttgtttaaaatcaatgcttttacttttttcttattttctttgtctaatagcacataataggacagaacaaccaatattattgaagaactaagagccacgataatcactcttgtaaaggactcaaccaagatatgttgtatgagtaggattgcggtaaaagaaggaatacttatgaaaagattcactaccatcgttgtgaagaaaaaacgtatcggtttgaaatcttcaacataatgatggagtgtatatgagcaaacgatataaatcaataatgtgctcactataggcaatccaaaagcccaagtcaagccgatacctttactaaacaataaccaaagtatcggaatgactgataatgatactgtccccgccataaatgaataaaatttcaaacgtccgacagcttgtattccaatatatataatattattattcaatgatatgaagcttgagactatcaataaaatacagaattcaattgtatatggaggaacttccacgagccataaattcattacataatgtatttcagagataaaaggaatagcaaccaacagatataacacatttgccaaacaagtagtttgctttagtaattgtatcatggcattgaaatcggtcaatgcgtattgctttataatttgcggcctcgaagccattaccaaattggttgatacttgttcaatcatcagttgcacagttgttgccaatccggctgcggcattaacagctgtactgccaaatatattaagcaacatatttgttccctgttgacgagtagtaaagcaaatattggaataaagattccatcctgaaaagctaaacagagaacggccgataaccttattccattcccaattaatccggcattcgtcataatgcctaatgcaataaatgcgatatgtcattgcaatcaagaatgaagataagagcataagtcctccatataaaatgagcttatcacatactgtaataagtagaagtgtagcgatcagcaacttcaacagtgatccaacaatttccacaatagcatacacgtccattttttcgtgcgaaataagagtcgcattgtatggaacttgagtgatgctgaccattgaggaaattattgaaaattgatacacccaaacagctgcactcattctctcatctggaatgttcaatttttcgaataacagccaaagtccgaccgtttcagccaaaaacaagactataattgcaattcctatatgtaatataaaggctgtattgaatgtttgttggagttgtcgagggtcatttttggcaagttcgactgtaagaaagcgtgaagtcgctccactcatcgttacattcaaaaagctaaataggacaacaataccgccgacaagtccataaatgccataatcatctacaccaagtgcatttaacacgatccgtgatgtatatagtgatacaatcatggacagcaacatacgtgcataaagtgccactgtattcttgaatatttttttattatttacggacgatgtcttattcatagcaagcttatgatcttcctaatacagacggaatgtatctttttattaaggttgtcgcaaaatagcatattgcaacaatgagtgcaaattccaatatggtccaactgtagtttacaagatgtaacttattgcgcacgatccagaatgtatctacaaataatatatgtagccccaataatgccaaactgttaattccacaccaaatcaatattttatccaatggaataagtttcagctttctcgaattaaaatatgaattgataaaccaataaaaattcataataaaaaccattgaaagcaacaatagatgcaatggaaaattgtttgattttaagtcaacgtaagagggaaatagaacgatgaaaacaatggcgataataagcaagaataatgagtatatcggtgaaaccttcatgccgtaccatttgttccgcatgaagcaaaaaccaagatggtaataaatcaaggtagacattgttgtgtcaataaaatatggcaaatcaatgttattagcatttaaccaatatcctactccatataataatatacataatgcgctgattgttaatgctttattgtagggggtgattttatgtatcaataaataaacgaatgaaacctcgaacaaacaaattaaaaaccaaattacatgaaataaaataaaagagttttcatcaccgagaaaaccatcaaacatactcgttacagggagcgagatcgcttttgcccaattatgagtttcgttaagtttcaaaacgaacaaatatgcgaacaacaaaaaggcaaaaaaggcccaaggaatcagtaattgtctggtcttttttgcaaaaaactctctcaaactgattggacgaaagaaacagcctgacacaaaaaagaaaaggggcatgtgaaaactgtaaataacggttttcaacatgtaagggatttgtatatgaccaaggatgaccaataaaattcctccccctttcaatatgtcaaaggagacaatccgattagagtctaccatctacaacgtttttttcaaagatagctttaacatcgaatatgacgtgttgagcatttagtaacgtttttacatcaaagcctataaactgttcgtgtgctacagctataattgccgcatcgaatttcttatccaaaggatgttggttcgttaccgagattccatattctcgcataactatatcaggattggcccaaggatcatatacggtgatatgtacgttatactctcgcaaagcattgtaaatatctataacctttgtgttccgcacatcaggacagttttctttaaaagtaaaccctaatatgaggatatgagagttgagcacctgtattcctttcttcagcatcaatttcgcaacttggttggccacatattcccccataccgtcgttcattcggcgaccggctaagattatctcaggattataaccgtgacgttgtgcacattgagccaaataatacggatcaactccaatgcaatggcctccaaccagcccaggcttaaatggcaggaaattccatttggtagaagctgcttccagtacatcctgtgtatcaatgcccattttagtaaatatcttggatagctcattcacaaatgcgatattgatatcacgctgtgagttttctattactttggctgcttccgctactttcatcgtaggagcgagatgtgtaccggcggtaattacagaagcatatacctcatttactttcttacctatttcaggcgtagaaccggaagtaacctttttgattttttctactgtatgaagtttatctcccggatttatacgttcagggctatagccagcaaagaaatcttcattaaatttcaatccggacactttttccacaaccgggatacattcgtcttctgtaacacctggataaacagtagattcatacaccacaatatcccctttggagattaccttaccaacagttgtgctggcaccgtaaagcggagtcaaatccggattgttgtttttgtctaccggagtgggaacggcaactacataaaaattgtaatcacggatttcctctatattggcagtacacttaaaaccattggcaagggcagattggagtagttcatctgacacttcgagtgtcgcatcatgacctgccatcaaagcagtcacacgagcttggttcatgtcaaaacctatcgttttatactttgtcgagaaaagacgagccaaagggagccctacgtaaccaagaccaattacgcaaattttagtttcattcataatttcatctgttattattactttaaatattcttccaataccatttgacagcctctttcaaaccgtcacgcatactgtattgaggattgtaacctaaaagggattttgctttatcaatacatgccaaggaatggggaatatcccccaagcggttgggaccatgaattattttcacgttggcaatttcggggtcaaattcactcaaaaattctttcaagtaaccgaccaactggtttaatgtggtgcgttctccgaaagcagtattgtatacttggttggttgcattcggatttgtcgtggtcatagccagcatgttcatttgaatcacattgtctatataagtaaaatcgcggctatattcaccatctccgttaatgacaggactctcatgagccatgaatttcttaacgaacaaaggaatcaccgcagcatatgccccgaatggatcttgacgacgaccgaaaacattgaaatatcgtaagccgatacattccattccataggttttggcaaacacatcggcgtaaagctcgtttacatactttgttatggcataaggcgaaagcggtttaccaatcacatcttctactttgggaagagactgactgtctccatatgtagaagaacttgctgcatatataaaacgctttacattggcatcgcgagcggctgtcagcatatttaagaatcccgatatattagtttcatttgtagttataggatctttgatagaacgtggaactgagcctaatgctccttcatgcataacgtaatctacattttctacagctttcttacaatcgttcagattccgtatatctcctacgataagtttaaacttattcggatatcgttgtagaaatggaaaaatgttttcaggtttacctgtggaaaaattatccaaacagattacatcatagtcgtgagccaataaatactcacataaattggagccgatgaatcccgctccaccagtaactaaaacttttgttaatgacatatggattgttgttttatgttgaagttgcaagcctattgcttgataggggtgtaatgatttattttaagactggtttggataaaagagagattgtgtgtatctgctccaagtcgattgttacaatttccattgaattccagcctgttggatttttttgtatgtattttatgcaaatccacctagagagaaaaagttaaacagaatctacaggtcttaataaccgataattataatctatttaaactataacagtctgactatcaattaaacagttttgtatattttttgtaatactcgtacaaatgaacttttgaaatatattgtaattgtgaatgtccgttcctatatgagtaatagccttttcttttaatagcagcatggcttttttcttaatccggttgccatacatacccgctattgacggaagattgaactgaaacttcactcccatgtcttttaattgttgataatccgactcacccatataaacataccgttccggatgggcaagaatgggataatagcctttagccttgatgcggagcagaatgttgttcaatcccatcggagggttaaagtaggaggtttccaccagtagatggtcaccgctttcacccaagggcagcagatcgttcttttccaaccgttcctcgaagaggttgtcaagcatgttctctgaggccagatgcagttttatcggaccgctataggtggcttgaagttcagcgtaacgctcccggaggtgcagtgtggtgttgggcatatcttccatgatatgcggtgtaagccatacggattttatgcccaactcttcatacaggcgcagtatttccaatgcttcttccatcgtctgcacaccgtcgtccacacccggcagaatgtgcgagtgacagtcggtaaaattcttgaatataccgctatctttcagcgatatacgtttcctgaatggccacacaatgatacgagtatttttatataaaacattttattttttttaattaataatcatccatttatccccaccctgttttccgtcggaaccttagtggtatcctgagccgtaaccgtagtgataaccatatcgatagccataacggtatccatagcgaccgccacttccctcggtcccgttcaagatcagggacatgttcttgtattttttctcctcgtagattttctccaattcagcaagcatactccgttcaagtaatcctgcacgaactacgaaaacggtacggtcggccagtttctcaataatttgcgtgtcggccaccagttcaacgggcggacagtcgatcagcacatagtcatattgctcccttacagtatcgattgtctgctttaaccgctcgtcgaacaataattccgttgggttaggaggaatcgttcccacgggtagtatatccatagatttatgtttcggatcgggtacgatgatctcatccagattatcgatacgacctcccagatagtcgctcaatcccttgtcaggagagtcgatataggatgatgcagaggcgtggcgcaggtctccgtcgattaccagcactttttttcctttgatggcaaggctcacggcgatgttcatggtcagaaacgatttgccgctgcccggattgaatgaggtcatgatgatgacattcgaagtcttgtccttgccggtcataaattccaggttggtacgcaatacgcggaatgcctcgttgatgatgtcacggttgccctccttgacgataacggccttgacttcctgcggtttctttcctaatatcccttttttctttcttgtgaacagcggaatttcaccgatgaacggtatagtcaggttttccaggtctttccttccccgtacacgggtattcatattctcgcgcatgaagataatgactatcggaatgagcagccccagagcgaatgcgaccataaagatatttttatgcacaggggatgtcggcaacatgctgccgtgtggcggggtaacaatgcgggtattataagccgtgaacgcctgtgagagttcgttctcttcacgcttttgcaacaggaataggtaaagagcttcctttaccttctgttggcgctccaccgaaagcaggtacttggcctgtgttgggttggccgctatacgtgatgtcgtctgttgctccgtctgccgcaaactttttatctgcgaattcaaggtcactatctgattgtcgatagatctgattatcgccccacgcatggatgccagagcctgatccatatccacgaccagcggattttccgtgctgctgttcgcaaccagactgttgcgctgcaacagttgcttgttgtattcggcaatctgcgattcaatattggcgctttcaatgccggagttggccggaagcagttgggtacggttggcatcgttggctaaatagttccggatgtaacgggtcatataaagctggttgttcagggacaggatctgcgcgttggccgcactgctttgagccatatacatactcgatgccgcctgcacgtcgggcaacagatgttctgacttgtaagaggagatatcctcgtccacatttcccagttcccgttcgattacgcccagacgctcgttgatgaacattgaggtgctgacagcgatctggtttttgtccttcacccaattctcgttataaacggaaatcaacatgctcaatacatcttctgcccgctgtgtggagttatccttgaatgacaagtctatgactgacgctttctcgctgttcaatgaaacggacagattggacgagcaggagttgacggcgttatacagactggatttgcctacatataatgtatatgcctcgcctttcacgtaattgggtgttgtatggataatgatttttcccaatggcgtagtgatggagtcgagcaagcttccctttacgtccttttcttcaagatctgtcccgttacgtataaagtcggataggtataacgtaccgtccggctgtatttccaacgtaaaaccggctgattcattctcaggcaagtcatttatcgttacatccaccggtaatgtcagtccataggctacctgacggtggaattttccccgaacgaagtaattcatatccagacgcaaccgtttaaccacttcggtcattaaagacggtgatcgaaaggtgatgagttcgttattcacatttgtaccggattgaaacagcccgaactccgagaaggattccaaatccgaggagaccgacttgcctttggaatcctctttgatcaataccgaagcggtacgtgtatatacggcaggagtgcgtaacagataggcagtagcggcaccgatcgttaccgctaaagacaagacgaaccacttccatcttgcgaggcacaggtataacaggtcctgtattcgcaggaaatcatcctgctgccccggttttatattcttttgatttacggtcatcatatctgattctatattattttacaatcaacacggtaatggtcgtcagcaacgaggccaatgacatccagaaagaggctgagcggacgttattgccgttgacggtcgcctgccgtgctttcattgagttgggttccacataaacgatatcgttctgctgcaaataatacacaggagaggcataaaggtcatatcccgaattcaggttgacctgatacagggtttttttcccgttttcctcccgttgtaccagcacgttttcccgtttcccatagacggtaaggtccccggccatgcttaaggcctccaaaagtgtcagcttgtccttttcgatattgaaacgtccgggggtggcaacctcgcccaacactgaaacggtcaggttcataaactccactgtaacaacggggtctttcacgagattctttgaaaccaattcctcttttatatacgaggcgatctccgcgcgtgtcattcctgccacatggatatgtcccagcacaggaaaatcaatatccccatccttatttattgtatatcctgatattccctgactattggatgtacctgatgtcgtaccaatctgtcgggatatgatcggaaggttgaaaaggttcattaataaggggtctttgctgttgacctgtatggaaatcttgtcttctggacgtatccggatttccagcgggttcaagacttgctctgcggtaccccgtttcaggtccgtgaaataagcgactttcggtgtggcacatgatcccaatagaaaggccacggttaataaggataaaatgtatctgattttcatatttattgatttttatttgttggttttctgttccgattgaagttgtgcgatagattttgtcagcctgatgttggcgagagtccatatcaatatatcacccaaaacgatccagttcacattgagataaagggacagaagaatattgagcagtatgaatatagttgacacggaaacaatgatgatcatggtattgcgctgctttattccgagagcaagcagcttatggtggatatggttcttgtccggcaggaacgggttctttccgttgcgtacccgatgcaggtaaaccctgaccacgtcacagcatggaaccagcaagggtgagaaggccagcaccatcggatgtacatttcctgtattatcgtctagtccgcacatggtcagtttgagactgaggaaacagagcatcatgccgatggtcaaactgcctgtgtcgcccatgaagatcttccttccgtgtttggcgttcccgaaaacattgtaatagaagaatggtaccaacactcccaatgtggcaaacgccagcatggcataaacatactgatggagcataaagaaagtcagtccataaaataggcaggcgatactgcatagcccggaagccagcccgtcaatgccgtcaatcaggttgatggcattgatgatgaagaccacgatcaggatggtcaggggatatcctaaccataacggcaccgcatggatgcccagaacaccgtataggttgttgatatataccccaccggcaataagcatcacgccgcacagaatctggatgacaaacttggcacgataacggataccgatcaggtcatcggccatgccaaccagatatagtaccatgatggagcagaaagcaaaagccaaagagcacacgtcgttcccgatttcggacaatatctccgaatgtcccagcaccatattgattcctagcaacagggctatggtgaaaaacactaccggcttgaatgcgataccacccaatcggggcaccgcacaatgatgtaccttccgctcatcgggaaagtcgaacaatttcttacggaaagcgattagcagaatctggggaatgacgatacccgcacagagaacacaaagcaaaaatgccagtgaacaatttacaatccaaaaatacatatattcaaatattattttatttgtgtaaggccacgaggaaggggaacttcatcatctcctttttgtgtcatctctcaaaatttgtcacaatcggaatcattgatgacttcaatcaaatcgggatgaacttctaccgatatacccataatcccttcaagcatcacaaccacccggcggcgacgttttcctttcacccgcatgaatacgccctttactccattgaacttgccaccgtaaatacatatgtgggtacctttccgtatgtcaatctcttccggtttataataaatagtgttttcttcatactgcgaggcaatcttgataaagctctccatttgcttatccggcaccacgatatatttcagtcccgtgcttttctcccacatcatgaattgtaagaaattatatttttttttgaaatccgtgatctgttttcgggaagcatgcacgaagacgagattcgggatgactggtacaagccttttggatttcactccgtgatagacccttacggcatagtgtttcggtatgaaatactctagaccatccttgcctttgagcatctcttccgcctttttctcgtttttataagcgctcatggcgaaccattggattctagttagatcttcccttgtggttatgggagtactcattcgtcgtgtgttttttagttattacggcaggtcaagatatacccatagttcatcccaacttatgtattggtctgtattatagtaatttatgtcttttttggctgtcatatcaaccattcatgccgtcttttatcttgccgcattcctatttttctccataagagaaatagaggacataaatatttaacatatataattgatttacagggattattcgctgtaaatacaatctagtttactcaacatttgttatgtaaccacgacatttaacgaggtggctattaaggtttttctttgttttatgctattatgttcaataatttatgtatttttgcatattcaaaacatttctcttatggagaaaaccgtcatttattcaatctttttcaagcaagaattttgtactttcacggggctttttcctttctgaatccatcttgtcatacaactgaaagtatagggtatatacttgttcattatattcctatggcattcgtataggaaatttctcctattttcggtgtttctctttctgagagaaatggggtgattggtattttgatgtatatcaaatatttataagattggtataatcaatttgctcaacaaataatcagttttttctaatcatacctcttattttttatggtatgactaatatttttcttctgatttttagtgttttttgtgttatcttttgtacttttgcatttacaaatctttctctcagaaagaaaacttcaatttgtataacataattccaacttattttttgtcagataaataaaaataataattgccatagaataacagcgggccgattgggcacgtatgctgaaacctatggcgtaaactgttttataatgtgaattaaagtgtatttaaaataatactgttcgctttatccactacggaggtgtctaacgatgcaagataaatccgtgtagtgctttctgaatcatgtcccatagcttcgctgatggtagccaacggaatgtttttgcttctggcgatagaagcccaggcgtgacgtgccacataactcgtcagcggaataggaaggccgatttgttttcccaatttctttagttttgaattcaccagctgggctgcattcttgtattgtttccgttcatccgtttttgcgtcgagaatgatcggcaatagataagaagaacctatggtatcgtatttatctatgatttcttgcatgggcttttcccatttgattactagctgttggttggtcttttttctgcgatatgataaaaaaccgttttgcaaattacttttctttagataagccatgtctataaatgacatccctcgggtataaaaactgaacataaataggtctcttgcatattccaaagaggagtcgtgacttaaatccatatcgcgtatctgtcggataattttggccggaactgcccgttttacagttttatctatgcccgtatatacatgtttaaacggatatcgctgtataaccaattctttttctacggcacgattatacatggctctgaggtttctcatgtaataggaagtactgttcggacaaatgtcattagattttagatattgttcatattccatcatcaggttggagtctatattgtcgaaagggatgtctctgcctttctttctgaaattcatgaatcgcttgaagctattgagcgtagtggtataagtttctgtggtgcgtattttacctatttgtctcaattcttcaatgagattctcacaaaatgacacaaagtactcgttcacaggaggagcggaataatattcaatgatttcgtctgccgtatatttgtatccaagattctcaaatcttatcataatatcttttagacgtgaggtgtcttcctcaatacatttttttaaagaaaccaaataccgatgccggttttctcctgtctttgctggtatgattatttgggaattgaaaatatcccactcgtcaggataaatcttgtatcctgaatttatctgccttgctacacgattatgaattacttgatagaacaatgttcccgcttttccttctatagaggaatgtcgatactttatttttaatgatgccatttttttgtttaattaatattatattctccaaaataaatgttttggcgtattatatgtttaataaccaataaattagataactgtttgattttgattatagttggatttatattgatatggcgaaatacttggctattatatatcaatgtgaataatgttggattttattcttcttttatttccgtactgcccttttccttgttttctgcctcccctaatgtacgttttttcatagccccgtctgagagcctttgtttttgaacggcaaatttatttcggtggatggatacgaaagagttccggtcttcgccctttgtaccgaaaaaaataacgccggacggcttcgctgtccccaacattttttgtcgtccaaaacttttctcaatccctccttccttcttgttgtgtgccgtaaaaaaaaggcttataaactcagatggggcatgaaagctcaaaaaaaaagtcggcagaaagaaaaggtcatcccggaaaggggttttaaaaaaggtctttaaatctagctgaagcataaaattagaagtttaaccctttaaaaatgtgacatatgattacagtgacggaacaactaaagaatgtgtttgaagccaaccctttgtactcaaaagaggggcaggggcttaatgcggaagtcatcgcaaggtttttccttcctttttcttcggtggtatggttggtaacggaagccgaacagcaggaagacggtgactggctttttttcggttattgccatattcaagaatgggaatggggttatgtgcttctttctcaaattcaagaggtgaatgttcgtgggttgaccgtgcagctggataaaggactgaaaaccggtataacggtaaaagcttgcctgaattgattagagaataaacggagagggaacaacccctttccgctttccaaccggaatattgaacttaaaaacggaagttatggtttacgagacgaattgcacggaaataacacaggacaaatggcgtgagctgatgaagtacggtagaaaatgctcctatcggctgcttacggcgagaatcaagcgggaattgccggaattataccatgcgctggctctccagttctataatccttatgcggaacagtgcaggcagacacccacacattatatattggttcattcggccattgaatattttatcagaaaacaataaaggacaaatggttatgaaaacaaaaaaggttgataaaaagaaaacgctggcttatgcggtggcattttactttacggatgtttccgtaaagttcatgatggggaatgcgatgtatgagtatgtacataccgtttatgacaggcggtatgataacggtggctttaatacgcttgccgtagtctataattacaagaggatgaagtacgaggtattggtcgtatcggacgagaaggtaggtgataaggagattcatatattataagtttcacaaacagggcttttgccatataaaaacggcttttgagatgaaaaagttatcggcttatacggttgcatccaactgcaccgacttgacggatatacgtgacggcatcgctgaaatacatgaagcgatgaagacttgcgttgaatccgggaaacatatcccttcattctatgtttcccggttggccaaactggaaactaaaaagaagaaactggagaaacggacgcaggtacacatgaccgtcaccatccgtttctttatagatgatgatacccttacaatggcagtcaggcattgccttttcttcaagctggaaccgactcggcagaatgtgatgaaagccatccgtgatgcggttcttaataacggacgttccattcttgactttccggaagcatggggagaagatcttatggatgtgtctttctttgatgtggagaatgccatgaagaagctgcgttcctcattcggcctataaacttcattgcatatttttccgaaagtaaagtaaccgttggatttttggccagcggttcttttttcaaaaaagaaccaaaaactttgaatacaatcttttttcatcttctaacttatgtattcggaaaaaattccatggcattcagaaaagggatgatagcggtttggggattatagggtagatttgtggggtaagcttacagagacagtttttataggcaggttccgaaaagcctttgagagagtaggagaacatgagttataatatatggctataagtataaatgatagacaattgattacacaatttattactaatactcagaatttgaatgttaatttacctacaaatggtggagggtgtgctaatttagttagaggaattatagaacaggcaacaggaaaaagaatttcagttaatccttttggagcttctttagaaagtatgatacaaaaaataaatacctatcatgatttagctaaatgtaataatggagatatattatattttgtgcatcttcctaatgctgctgtaaatttacatcaaactattcattatgcaattttttgtaatgttaataatgctggtgtacagaaaaatgttattgggataaatggattagcagatctttctttttctcccacagcttatcatggtgttgtagcatctgtaatatctccgggtaattttaatggagtagggcaggtgatatatgatactgtagcattccctaatattcttggtgaattgtatgttattgattatgaattgatataggaataagtttcttcgttattttatggcgtacagtagtatagaaatagaaaaaaactgaaaattgaatagtaaatttgtttgctccatgttacgtttattaccgcttgtaatcgggctttgcgcagactttatgtcctgaaggctttttagtaccccttccatttggaagattttgacagcagcgatgaaggtggtggaggatatatccggctggaggcttttcagtgtgttctccgatggctgatatcctctcatcttcagttccagaatggtattgaaaagtcatcatttcgcatagccttcatgaaagcctcctcttgttcgttggcaatgtccggatttggatcgtatgcagttgcttgccgaacaagaacagactttttattaatgtaatagtgtcgctattcgtctgtttttatcttctagctaaaggcagtaacaaccgttccacaagttctttcttgttctcaacgggcatcttgtttctgcctttggcaatgacttcagcagccaaatcgcttttacgcccggcaatgtatttctgtcgctttccgtttatgaaggcctcgatacggaaatcatgccgggtgttttcgatgatgttgatttctgataccaaaaagccatcctctgtctcgtagggttcgacaatggtgggcaggtagtgtttcatggttttccctatgatcggagataccaaaccggaaagatgctcttcgatgcggtctttccaatagtcatcgatttgatgattggtggcataatcgtaaaaatggctgatggcaaggctgacttcttcgattatccttttcgcattctttattccgttctgtttggcaaattgcatcaggtcatcttccgtgatgtcgttatcttttcctgcaatgctcatggagtgtgcgttttcgtatgccgcaccgtccaaattggtggtgaatgtcatgtcgtaggctggggtgatgtgccatgtgccgtttctttccatcaggaaagagaaattcttgatgtggtcatccacattgccgcccatgatattgaataccgtcctacggtagagttcggactgttcgcttgccgggatgttcagttttcggcagacttcaaacaaatcctcatagctcgttgcatccggattcatggcagcaagtgtctgtgtatgtatcttctctccgtttatcctatcgtaacgctccgtcaggaagtgatgttttccctcaatttgaatgagtcgggaaggcatcatcgtaatcccggcttcctttgccatctcataatataccatttccatttgcgtgaacggaaaatcgtccccttctgcaaacttcaatatgtagtaggtatagccctccggtaaagggacttggccggaacgtatatcatgtgtcgtttcattgatggcgatgatggctttcgggtgctgccctccggctgatgtacctatctcatagatactttgcagttgcagtgcttcgtcatcttgcacggatatttcctcccgttcctcaaagatacggcgtgccagttggtataaactctctatctggagagtggaagaggattccaatccaggagtggccgggatgaactcaaaggctcccattccccgtttcccgatgaaagacagtttatctaccggtgtgagtttgcgcttggggatatggttttgtgccgcccattggtcgaagaccatgttaccccaccgatcaggcaatgaatctgccaaaaacggtgggagaccttgataagtcttttctttgtttccgagtatgggcataccctttgccgccggtcctttgacagaagcggtcagtggggcgatttccactcctttcttgatgaaatccggatgatagttgaagacggctcttttgtttctttcgtcccaatagagctttccgacttcttctccccataacataacactcacaacattattttccatgtcttatccttttcggctttttattcattattcgttccattgtataggctgaaacaggtatttccggcatcagatcatccatctgttccagacagtccactactcgtaacagggcaagaaagttgcccatattgatgttataggccttcccgttctcaaactggcgtaaggtgataaggctgacaccggctttctcggcagcctctttttgggtgagcctataggttagcctgtattccttaaatcgtctgcccagttccactatgatttccggattggccatggcttgggtgatgtgattcgttgtcattttacaaaggtaaatatattaattgttaaatcaaaatatgatatataacaattaatatatttactgttatattgaattgtgcgcgatgtagtttgtgtgctaatcccccaattccatgctacgtttattgccgcctgtaatcgggctttgcgcgggttttatgtcctgaaggctttttagcatcccttccatttggaagattttggcggcagcgatgaaggtggtggcggatacatccggctggaggcttttcagtgtgttctccgatggctgatatcctctcatcttcagtttcagaatggtattgaagtcatcatttcgcatagccttcatgaaagcctgctcttgttcgttggcaatgtccggcatatggatcgtatgcagttgcttgccgaacaagagcaggttttctccgataaaatcggcgtgttccggcttgaccccgcaatccttggcagtctcatgccaatgcgatacggtttcctgtatctcttcgataatctgtttgtgtttccggatacccatgttctcacctaccttttgcagatcttccatcgtgaaattgtcttgtttgccgttgagtgacagctggtggcggttcgtccatttgccgcccggtgtgtatgagtagcagaggtcgtatgctggggccagtttccacttcccttgtctatccatcaggaaagataagttcttgctatggtcgtcatggttccggctcatgacgttgaacaccattcttcggtatagttcctcctgctctggataagggaggttcatctgccgcatgatacggaatatctcttcgtatgaatggcgttggtcacggtcatagtgggcaagcccggccaatgtctgtacatggatcttctctccgtcttccatacggtcaaaacgtcgtgtcataaagtgatatgactctttttcctgaagtaaccggcattccatcatatcgataccgcaggcttttgccatccggtgataggcatattcgatatttcctattccttgtggattgtccgttatctgcgtgtgttcgctgtatttgccgccatcaaatttcaacagccaatacccgaatccttcaggagcttttacctgtccggagcgtacctctccggtaatatcgttgtaggcgatgatggccttgggcttggcacctccggcagatgttcccactttcagtatatccagaatgtttcttccttcctggcgcagttggacctgaaaagccattctgtccgtgaatacggatttggcaagctcagtcagttcctcgatatggagcactgatgattcgttcatgccgttgattggcgaggacggctcaaactccagtgcgcccatgccacgtttgcctacatagcaaagcctgtctaaaggggtaatctcttctccggacaatcccttgctggcaaaccattcattgatgatctggtttccgaaagtgtccggcagtgaatcggcaaacaggccgggcaaccccttgaaacagtcggtacggttttcaaggaaccggtagggggtgttcctgtactggctgatgggcatgatgatgggagaaatgtcaagaccggagcggatgaacttccgttcatagtcgaacaaggcggcattgctttccttttcccaatagagagagcctacgctttctccccatagctttacatctactatcaaatcattcatggttatcttgttttaaatggcgtacacggtagcgtttctttccttgcagttttttgagctctatcgggctgacccggatttccggtaccagttgctccaggttctccagcaggccgagcgagcggagtacgctgatgaacaacagcagcgataccgatttgcccttctcgatgttcgcaacggtcaaggggcttacaccggaagccgttgccagttcttcctgcgtgatatgctgcctgatacgtgtctctttgatgcgctggccgattctcatcagcacagctggattgctcatttcattccacatggttgttccttttttgcaaatatacaaataatccatgtaaatatatagattaacttgaatatatgatgttaatctatatgaatacaatgattatagttgctttatcggctgtttttttctttgaactaggatgaaaactgactaaaatcacaatgtgttgtgaatatgaaagagctaggaaagatgattaaagagtgcaggaagagtttgaaggtcaatcagctggaacttctccgaactggcgggcgtgggcatcaatacgctggtggccatcgagcgtggagaaggcaatcctaaattggctactgctttccattggagttgattaaagtgcggaaaaatgtataagattgcttctattatctgtttattttagtatatttgtgctttaaataagtgcggataaatgtattatacgctgtttttacatgtataaaaatgctgtttgtagatgaaaagatttgttttgcaacaacttatagaatggaaaaaccgtgaggatagaaaacctctgattttaaatggtgcccgacaagttgggaaaacatggctgctccatgagtttgccaaacttgaatacaaaaaagaggcttatgtggtatgccgtaagaataaccttgcacgccagcttttttctcaggatttcaatgttgacagaattttacgggggctgcgtgcgatgacttccgttgacattactccgggtgatacgcttattatccttgatgagatacaagatatcccggaagcactggaatctttgaagtattttaaagaggaggttccggagtatcatatagctgtggcaggttcacttttggggatatcccttcatcaggatgtgtcttatcccgtagggaaggtaaatgtcatcaatatatttcctatgaactttgaagagtttcttgtcgccaagggagaagaagaagcttgtaaattgcttatgagtggggattttgaaacgataagcctcctgcatgacaaatatacggatctccttcggcaatattattatgtaggtggtatgccggaagttgtactcaaatatgtagaaacggattccttgctggaagtcagaagaatacagtcggagattttgcaaggctatgatcttgacttctcaaaacatgcgcccaaagaacaggttccgcgtgtccgaatggtatggaacagcattccttcccaattatttaaagaaaacaagaaattcatttacggagctttgcgaaaaggtgccagagccaatgattttgagatggccattcaatggcttgtaaatgccgggttgttgtataaagtgcctcgatgtaccaaaccggagcttccgcttgatatttatgaagacctgtcggctttcaaactctatatggttgatttggggcttatgggtgctatggtcaagacagatccggcccaagtcttgattaaaaacgacatatttaaggaatacaagggaggaatgactgaacagtatgtattgcagcagatgaaaagtaagggcgtgtcaccgatttattaccataacacagacaattcgcgtcttgagttggattttgttattcaacgtaatgcccaaatggtgccgatagaagtgaaggccgaagggaatgtccgggccaattcgttgacagcattactgggaaaaagaccggaattgcatgcggagagattttctatgttgccttataaagtacagggtaatcttacaaattttccgctatatgcaatataggtgtatccttttcccatgccggtcataccgttagaactgattgataagtatgatgcgtatgttggccggtatgtctatctttgtggcaatgaaaacagagagaggattgatttacgccttgttttccgggacggaaaggagattggcacggatgatctgaatctgtattataattgatgtgacggcttggatgtcccccggatgaatgttcgggggattctttttcttttgggcgttcctgtgggacggtcgggctttacgtttcaagtcctcgcctaaaggctgtgggctttactctgcaatccctaacgcatggctgaaaactcttcttgccggtgttcttcttcttcatacagcctcatgcgttcttgtaatgcttcttttaaattgtcgctttttttcagtccgagtttggcacgtatgttcgctcgttggctggttatgtttccgctactccgatgtaataattcgcatatttggctgacggtcttgtcttgcagtattaaacggcagatgtttaattcggacggggataaattgggatatattctcctgattgtatcaagtttacttttttcctttttctggtatgcggcaagggctgtaaaaagattttctttggattgttcccctattatgtttaacagggagcttgtcttttcttccgggttattctcgcttaacaactcggcgaacgcgaatagttcttcctttttcatttggagacgtttcaaaagcatttcctcttcctcttttagcaagttgctactttttagcaagctgctgatattactgtgtaaggatcttcctaataaggggatcatggtgtatatgatgatgatcaaaggcagataactgtataggaacggttcgtcggtgataagtgtgcagattgtataggaagctatggtaagggaggacaataggatggagatattactcatataggcacagatggaaagcatggtaaataagagagagatagtaatgttactcattatcaatgctctttgataactatattcatatccgctacatattgagcaataaattatttcgataaaaatctcgatatgtatggctatcagtataatggaaaaggtcgtggtcagatttactctctttttaaaataagcgagagtgcacataatgataaacaggaataatacgctgttaatataataaaactgttcattgggaaatggaactgaatatatgtatatgggtgcgcataagaccagcatgagcagggatagatgaaagactcgtttttgttgatacgttattatcatttctctttcttttttgtcgtaagtttgagtttttattgaacttagaaaagaggcggcttttgtgctgattttcatgtgttttattgttttaagtgttattaagtataatgtttcctgcaaaaataactgtttttttttttttgtatgtttaagtacttttctttatgatgttaagtgtttttaattgttgtgtaagcgtgattggctgctgtggtaagtgttgtagctgttgtgtggttgtctttttaagtatttataagtttaaaatacttgttttttgctttggaggttggtttataagtgcatatctttagcggttgaaattcagggggtgtaaaagcctgggtttggattgtcatattaacaaatgattaaatgacgaaaagatgttttttttatattaaatgtgtattgttcgtgctcgtgttgagtataagcggagaaatatccgctcaggagaagcgtgattcggtaaggatctattttcatcaaggaaaggtaaatatagatacatgtttacttgacaatgggaacgagatggagcggtttgctaaaatctgttccgcattgaacgactccgtccgtcttatcaggaaaattcaaataataggaggagcttccccggaaggaggggggctgttgaatggaaggctgtctgaaaaacgagcagaggttttgtggcggtatatatcaccttatataaagattccggtattggagaaggattttcatttttcgggaagcgactggaacggacttataacgatggtgagagcggatgtgaatgttccggagagggaggatgtccttcgtttgttggagaagatcgtccgtttggaaaaccaggacagcccttatttggggggagaactgaaaagactgaaaggggggaggccatactcatatttgtataaattccattttccgaaacttcgttcgtcgatggtgaaaatatgctatgatagtgatccgataaatcccgtcagagatacggtatatatacatacacgtgatacgttgtgcatccgtgataccgttaccgtcatagctccggtaaagaaacggccgttttgcatggcggtgaaaacaaacttgctttatgacgctgttttgatacctgacatcggggttgagttctgtttggggaagaactggtctgtggccgggaattggatgtatgcctggtggaaaagtgatcggaagcataattattggcgtatctatgggggagatgtggagttgcgccgctggttcggtcggagagcggtggaaaaaccgttttccgggcatcatgtcggattgtacgggcagatcgtcacctatgatttcgaattgggtgggaaaggttacttgggggataaatggagttacgggggaggcgtggcttacggctactcgttacctgtgggacatcggttcaatgtggatttcacgttgggaatcggctaccttggaggatcgtacaaggagtacatccctttggacggtcactatgtatggcagaccactaaaaaccgccgctggttcggcccgaccaaggcgggtatctctttggtgtggttgatcgggcgggggaattatagccggaagaaaggaggcaggcagtgatacggatacgctttagtctggtgttcatatttttatggataggactgacggcttgtgagcataaggatttatgttacgatcatccgcactttgccacggtgcgggtaatattcgactggaccaagatttccaatcatgacaagcctgaaggcatgagggtcgtattttatccgaccgacgatgaaagcaacacgtggatatttgatttccccggaggagaggatggggaagtggagcttcccgagaatgattaccgggtaatttgcttcaactacgataccgacgggatggtttggaaagaaaacggcagttacacgctttttactgccgatacgcgtgatgtgcagtcgccggataaccggacaatggctgtcaccccaccttggctgtgtggcgaccatatagacgaagttatcctcaaggacattccgggaggaagcgcggagatagtacggctgactcccgtaaacatggtatgtcactacacgtatgaggtgaacggtcttcggggactggatagggtggcggatttgcgggccgctctttccggcatgtccggctcgcttaacatgtccgccgacagtttgcccgccggtctttcggagagcctgctctttgatggaatggtttcacggaatcagattataggcggattctatacgtttggacattccgcacttgaaggagagcccaatgttttccggttgtatctcaagaaccgttcaggcagcatgtctgtattggaacaggacgtgagcggccaagtgcatgatgtcccggtagtggggcatgtcggtgatgtgcatctggtgttgaattttgattatgaggttccatccgagccgggaagtgacggtgcgggatttgatgtggacgttgatgattgggatgatgtgaatatggatatagtgttgtaatatgagtttattaattatatgtatcaatttgatttatttttatttatgaaaaaaagtacagtaatgctttgggcaatctttggagctctactcatgggttgctcagacgaggagattgcgaatgtggaaacctcctcacggaatgcgattggttttaacgtgttaagtaatgcggcggaaacgagggctacccctactaccaacaccaacttgaagaacaccgatttcgacgtgttcgcttttacggcggatggtactgccttcatgggaaaggtagacacggattttggacatgacggagtgaatatcgtgtacaataatggtaagtgggattataaaaatgcgagcgaccttcgttattggcctaccgaggctttggacttttacgcattcaatcccggaacggttgatgaagccatgcagtggagttatatgtgggaagccaccaaggatactcaaaagataacttattcctgctccgatgagtatggatctggtatcaatgctcatgaaaactacgacgtgatgtatgccatagccaaaggccagacaaaagacaagaacaacggagtagtgaaatttaacttcaagcatattctgtcacaggtcgtattcaaagcaaagaccgaatacgataacatgcaggtgaatataaaggacatcaagatttttaatgtaaaaatgggcggcgtctacacattgcctgcgacagccgatggaacgggaagttgggctgtgggtgattggcctgaaagctctacaggaggaggttttattaccgtagtgcaaggcaaattcatcgaggtcaatagtaataccacagctaccgatatttccgaaaaaactcctatgctgaatataccacagaagctgacagcatggaaagtttccgaagaagccaccaataccaagataaaagccgacggtgcgcatcaatgttacctgtcgatcacctgcaaaatccagcagtccggaggttatctgttgggttcagcagatagttacggaacaatttatgttccgttcggagatacatgggtagcgggcaagcgtcatatctacacgttgattttcggtggtggttatactgatcagggagaggctgtgttgaatccgatccagtttgatgcagagacaacaggctgggttgatgcaaatagcaacgtaaacgttaaaccttaaacaaaaagtttatcaatatcgtacccgttggcaggttaaacatacgcaagattaatcccgccaacgggttctttatagggaatcgcattttcaatatactttttgatgtgtaggggtgctttttgcgtacctttttcctggagaatttcttttgtggagtgtttgccctgtatattcccgatacgctgttatagcagggaactgtttttatccaagtagtcagatatagcctcttgcaataccgattttagcgaatcgcctttgcggatcgcgatcagctttaagttctggtgataggtttcgtccatgacaaaattacaatgcacggttttcgctttcttcggcttttgagcctctttttgcccggccgtggattggatcaggctgtctaatcccccggtcagcccggccgacatactgttttttaaatcgttcttctttgccatatggttactttatttctgttagcagttcgttacataccttttcgtagtcctctgccccggcagatttgggggcatagtgaaaaatatcctgcccttgtgtcggggcttcggccagcgtaatggcgttgcgtatatgggtgctgaacactttgccctggaatgtttcctgtaccagttccgaaacgctcttgttcaggttctttcttccgtcgtactgggttatcagaaccccggctatcgaaagatccgagttcaaacgttgctgcaccttgtggacgacctgcataagtttggccattccacgcattgccaggaattgagcctgaaccgggataatcaaccgatccgaggccgtcagtgcgttaagcgtgagcagcgacagcgaggggggacagtcgatcaggatataatcgaatttctccttttggcccttgataaggtgggctaagataagctcccgtccggcctcgttgattaactccgtttcaacggccgagagatccaggcaggagggaacgacgctaaggccgtccttatgctcgtagatcggcaggtcgtattcgcctttcatcgcaccgtagatcgtttggggaagctccgcagagaagcccagcgattcggtcaggttggcctgcccgtcaaggtcgatcaaaagaaccttgtaccctttttgacgtaacgcaccgcccaggttgatcgtggttgtggtctttcctactccccccttgtgattcaatacggagattacttttgctttgctcataaattcagttttttaaatggttgtcatgtccgcaacatatagtcaaaatactaatatactaaaagactaaaagtagtattttcgttttttgcgtgttttttgtaccgatcggggaagcgtaccgaaataaatcctgtttccgtctttcggtacgttttgtttctgtaccggaattaatcaaagattagaataaccataaatgtttttatacgttaatcatacgtatgtatatatgtatatatttgttttgagtatctttgtgtgctatgaataaaaaataaaagacatgagcacttattcgtataaaaatccgaagtttataaattcccctaaaggggtggttgaagttgtagaagtgatttatgacggcaaagatgatccggcctattcactggctattattaaatgggaaaatacctataaattaggtattcgttggaacatcgcttatagtgaatgggacgattaccgcaaacagaacgggcaagatgaatgtataggtaatccacagtcgagaggtattcccacctggtttgttttgcccgatgatatgatgtttagtgagaagttcagcggtgcgatgcagaggcttgatgaattaagaaaaggtaaataagtaatggaacagggagaaatcatattataccagccggatgaagcggtcaggttggaagtgaggctggaagatgaaaccgtttggctgacacaggcgcaaattgtggatctttttcaatccagcaaagcaaatataagcgagcatataaaaaacatatatgatcagaaagaattagaggaaagttcaactgttcgggatttccgaacagttcgacaggaaggcaaacggcaagtgatgcgcaatctgacttattacaatttggatgcgatcatatccattgggtttcgtgtcaatagtaaaagaggtattttatttaggcaatgggcgaataaggttttaaaggactatcttttaaaagggtattccattaataaacgtttgtcagaacttgaaaggactgtcgctcaacataccgagaagatagatttttttgtgcgtactgccttgcccccggtcgaaggcattttttataacggccagattttcgatgcgtacaagttcgctaccgatctggtaaagtcggccaggcgttcgatcgtgcttatcgacaactatgtggacgaaacggtcttgctcatgttgagtaaacgcagcgtcggtgtctcggccaccatttacacccagcgtatcacgcagcaactccaacttgatcttgacaggcataacagccagtacccacctatcgacatcaggacgtaccgggacagtcacgaccgtttcctgatcgttgatgaaacggacgtgtaccatatcggagcctcgttaaaggatctggggaaaaagatgttcgctttctcaaagctggatattccggcggctgtgattactgacctgttataatatcctttgtcttatgaatgggctgtcgcaaaagaaaaacccgttcttgatgaacgggtatatccttgacttggttacgtgttttgataacagaggctttaccaagcattacaatgcaaagatagtaattataggttaattagcgaatttcttttttggatagatccggaaataatgcctccttgaaagaggtggataaggtgattaaaacaatagataaggaagaacaaaagcaaaagggatgaatgtggttatttattcacgtgtaagctcgcagtcggccaggcaatcgaccgaacggcaggttgtcgatctggagaggttcgcagccggacgggggtacgaggtgacggcggtctttgaggaaaagataagcggacgaaaggccaatatcgaacgcccggttttaagccgttgcctggaatactgcacagatccgcagaaccgggtggatatgttgttgctgaccgagatctcacgcctggggcgttcaaccctggagatcctaaagtcactcgatacgctgcacacgcataaaatatgcgtgtatattcaaaacctgaacctggaaacgttacggccggacaagacggtaaaccccttgtcctctctgatcactaccctgttgggggaactggccgcgatcgaacgccaggggatcatcgaccgccttaatagcggacgggagttgtacatccagaaagggggcaggctgggacggaagccgggaagccggaaaacggccgaacagaggaaagaggaataccgggaggcgatcgccttgttaaagaaaggctactcgatccggaacgtggcgaagctcacgggaaaggccgtttcgacgatacaacaagtaaaaaaagacttcattagtagctgattatcggaacaaatattgtatttttgcaacaaatacgagtaaatgcacataattaaaaacgagtatttacacgtgtctaaaaacgagtatttgcacgaaaataatcagaatctaaataaaaacggttatggcaacaatggcggagaaaatggcggcttcactggaggaattaagaaagctccaggagaaagaccgctgtgtcgtcctgcaagggacggccgagatagggaggacgcatttaacccggctgttggataacggctggttgcaggaagcctaatccgaagccgtcttttgcggcggcatttgaaagacgttcaaatgcaccgaatactcgttgttgctcatcttcggtcatgcccgtaccggtatcttcaacgataagtttcagcaaaccgttatcataatccgctgccaatgatacactaccgttatccgtgaacttgatggcgtttgacaacaagttgttgccgatttgcaggatacgttccttgtcggtcaaaaccaccgcatcggtgtggctctccactatcaaagtcagccccttgttcatggcaatgggcatgaactccgtttcaagaatatgcgtgattgcggaaatcctgcaaggggaaaggttgggttgctccttgccgttgtccagacggaagaaatccagcagcgtgttgagcatctcccgcatacgctcggaagattgccggatattatccacatacatggtgcttttatccgcgctacaacttttctgcatcagtccggcatagcctcattttgtcaatcgtattttttcgtggtagaagtagtttacgatgacaggtttgcctttttccgagcgtccgtatggcagatcgtttatacgatacgggaagccctgctccttggcgtaatttgaaatgtcctgctccaatgcctgccagtattcaagcctttttttattgtaaatttcctcgtaaagcggtatgaggtcaggatacttctcacggatatacgtcattatcccgcctttgaactgcccgcgtaaattcaggttttcaagccagattaaatcagcataatcttttacctcctctattattgcctttacgtctgttattctggggaatatgggcgagacgaagcatacggtgcggatacctgcctcgtatgtctgacgcatcgctttcagacggcgttcaatgcttacggcgttgtccatatctgcgcagaactgctcgtcgagcgtattgacagaccatgacacagtcactttgggaaaactcttcaacaggtcgagatcgcgaaggacaagatcggactttgtgcatatcataatctcggcatcgcttcctcgcagctcttcgagcagccttcgggtacggtggaattcttcttcatacggattgtaaccgtccgtcacagaccctattacaacacgttcaccgtcgtatttatgaggattcgttatcggcttccagttttttacatctaaaaacgtaccccacggctcggtgtgcccggtgaaccgtttcatgaacgatgcgtagcaatacctgcaggcgtggggacaccctacataagggttgaccgaatatcctcccaccggcagagaggatttggtcattacactctttacatctatttcctttattgtatccatattcattgtattcgtctggtaaattgttccggcaattcctgaatcattctttcgtcgcccataatcggcagcaaatcctctttcatgaacaccggtatgccatgagcctttgcctgttctgcaatgctaagcacccattcggggcgcgaatatgactttccttttcggtttccggtctctgtgcctatgacaatccagtcaattccctcgaaatcaatctcgccgatatcatcgaagagaggttcaaacgtgacatggtagtgtcgtgctttgatattctttttcaaatcatcaatcctccttttctcggaactgcgcgtaacggtcacgcccatccatacgttctcgtcgtcagaggagaaactgattttgtcagggcgcttcgtcagaaagatataggcgtgctggggattgctgctgatccgctcgaaaatttctgcgttccattcaggcttccaatcggagaaatcgctcattcctgtcatgagccacacatgaggacgggacgtatcgatgatgcgcagttttcgttccatgtattcaggcacggaaaagtcgtcggtaatgtggaaacggcggcagttgttacgggcatagcagtaagggcatcctatagtgcaccctaccactatgttcatgttttttatcagggatttaatgcagacactcataacacaactgtttctccgtcctccgggataatcagccggctcatgtcggcttcgtgatgcgttgcctcattgcgcagaattgcacgggtggtctggcaatggtcgatggcatccatgtgtacggctatcagcttgatatgcgaaggcaattcgtcaagtatctgcatcacttcgttctcgtcggggatgataggaccgtccgttttggaaaattcgggaaagattgcacctccggagtttaccacgatatagtcaggattgaaccgttccacggtgtctcggatacatgcttcccatcggcagtcacccattatataaacggtcgggaagccctcggcttttagcacataacctgatacaggtcccatcatctgcccgatctgcccgaaaccatgatgtccggtcgtgcggtaaatggatatgccgtctattgtttttatttcttcgatgggtatcacatttgtaaatccgtcgtttctgatggcgtccgcgtcctggggctgaacgtagaaaggaatttctttgggcaaatgtgtggggacactcggctcgtaatggtcgatgtgattgtgggtcaggagcaccatgtccacgcctccgataatatcctgaataggaatggtgaggtgtaccctcggtgttttattcacaccgagggccgatatcaaagtgcctttgtcggctaaaacggggtcaattagcatggtgtgtcccgcatacctgattttcaaggtggcattgcgcaccaattgtactgtagatgtctttttcatgactatatgtcttgttattgattacgggtgcaaagttcggaagaatccggcgaaacatctatgcctgaaaaaacggtaattatgccattttgataaatgaaattattatctttgcaaaaacgacaaggatatggacgagataatcaaccctgatcgactggtcagcgtaccgttcaacaagacacgctgcggcgtggatttttacatcaatactgccataaacaaggacatcggacttgtgctgacagaaaacaagcggtttaagacagacttcttcagcttctactttttccgtaaggcaaacggatatttgctactgaacttccgcaagattgaactgcgcgacggcatggttctcctgctttcaccccatcagcaacaagagtggcatgtagatgagacggcgttggattacacgttccttatattccgcgaagatttcatgcgtacttttatcgccgacaagttcttcgtttttcgccttttgtattgttaccagacagatacgccgccttacatcaatgccacacatgacgaaatgaaggaatatatgcggctgctcggaaagattaagtatgagctgatgaatccagtgtccgatacgtacaatatcattgtttccttactatattatcttttgctgattatcaatcgtacatacgctgccgcctattgcttgcccgctgaaattgctaaaaacaatttcgcttttcggttcaaggacttgttggaacagaatatccgcacccaccagcgggtgcaggaatatgcagacatgcttcatgtcagtcgcatcacactcaataactcagtaaaagcccaattcggagtatcagctacccatttgataaaacaacgtctgcttgaggaactgaagaacgaattgctattctccaaccgcactgtcagtgaaatggcggatgatttcaatttctctgatccgagccatctcatgcgcttcttcaaacagcaaacaggcaaaacatttactcagtacatgacggattacaataaaggcatatacgaataacttcttaatatagtcgatagcggctatcgaaatatggttgttgatgttcaggcgtttttgtactgcatgaaccattttacgatttctggatcttcgtgcgagccgagtaagaaaggcttgtcggtatccagcgtctttatccgtgccatgtcgtcggccgacagggtgaagtctaatatgtcgagattctgcttcatgcgttccggtttcacagacttaggaataattatgcacactgatatttatcgcgcccggacaggtgttcggtgcggaagatgacggcatgcagttccaaccagatggctacctgcttatgttccatcccgacctgctgcggaatacacctctcgggcggataatgcgtgaatattcgttcttttcctacgagacaaacgaggcattgcaccttagtgtggaagaacggcaaatcatcatggattgcttccacaagattcaatatgaattgaaccatccgatacaccgtcacagcaagaacctcatcacagacagcatcaagacgttccttgattactgcacacgtttctatgaccgtcagttcatcacacgcgacaaccaaaaccgagacatcctcgcaagatttgagcggttgcttgacgaatacttccatgatggggctgctaaacggataggcttgcccactgtacagtattgtgcagacaagctctgcctctcgcccaactatttcagtgatttattgaaaaaagaaacaggttcaaccgccctgcatttcattcatgacaagtctattgaaatagccaagacggaacttgcatctacagacgacaccgttaatgaaatcgcctataatctcggttttcagtacccgcaacattttacccgactgttcaagaaagaggtaggttacactccgaatgaatatagagcgcaagtgtcgtgagaattggattagtacagaatattagaacccaacacctctcttgcgcttaactttcttccttctgcgaagtatatccaccatttcctgattggcttccgcatcagcagtgttataagatgagccactgctttttagcaatccccaagagccgttgaacaactcgctttgtgccgtgccggacggtgcgcttggtgtagccgtttcatatattccggctgttattcccatacgttccctgcatctgttgtgctgcaaagccgcgtcaatcttggaataactgaaacgcctgtccactttggagccgttgaaatggtagccattcatggagaatacaacaccctgcacctcgctggtctgccccttatgcttgaaatgtacttccactccctgccgtttcaggttggcgataagcacgttccagttgccgcatctgccgacttccattttgatgatgtcgtaaagcgcatatttcgtcctgtctggctctttcaggcggttgcgtttgacattgtcctttccgccagccatatgcaagccgtatttcaaggtcaattccttgcagatgcgggtactgcgcagacgctcgtgcctgtccgatatggtattgccgttgttgtctatgcggttgaaagcaatatgcacgtgcggatgctccttgtcgaaatgctgggcgatgaagaactgcgtattcttgattcccatccgttccatatattcaagcgcgatgcctgccatgatacggttcgtcagccgtaactcatcctctttggaaaaactcaacgcgatatgtccgacaggttttgtcaccttatcgttcatccgtgactgggcattgaaactcatggcgatagtttccagattttccataaacaagccttcgcttgctactatctgcgtatccttcttcttgtcgatgatgtaatccaccgcacccttgaagtcgcttccttttacgattttcgccatcatatccctatcttggttataagttcatgaatccttgccactgccaccttgcagtcccaccgttcatcgtggaagcctccggcgtttgccttacgcgcaagctggttgagattgttagccatgccgcagagttggcggatgtatccggcatgttcctccgacagccgttctttcacatgaccgttacggaaacattccctcatgtactcgcttggtgatacgcccgcctcatgcgatcgtgtcagcaggcggaagtagtcggctgccgtcattttcactgcgatacggtatttcagtttctcggttgctgttaattctttgtattttcttacctgcctcaaatccgcaactaagcccttcaacgtccttcttgcgtgtacacgtcctctcattactgaattatcagataaattgaggcagaaacacccacttctgcctacaacatccccttaccccacaatgcgacttgagacaatacgcagtatcatacccataagttgtaggcgttatccaaaatcagtctgaaaaatatctgcgtaagcattgttacaggtatagatattcagcacataccgccttgatgtcctgatccacttggctggtacagagataaacctgaagacaaacgcttttatgcgacttgttgcattgagtccgaacctctttacgtcaagtctttggataatggccttgtagaagttacggataagtgctgtaagaagaaggaacacagtgttctcggccatgaaggatttgggcaatctgtcccacccgaaaccattgttcatatcatcaaagatacgttcctttcctccacgaaggttatagaactcgacaatttctcttacggaagattcatagtcgttagtcaggatacaacggtatgtgtattctccttcccaaagatcctgcacaccatccatccgtttctgtctttgaatcacaagtcggtatgctttacccttccacttctcaacaaggatagagttcaattcaaactcaatgccattgatttcctcagtcttccagcctctgagagcaaatatgtcattgtagagcgaactgcagcggttagtgcggatatagaaggacttgcagtgtttctctatttcctccacgatttcctcggaacatgatccgcaatcagctctgaaacgattgatagtgagcctgttctgttcaaatctctcaaagaacctcttcagcgtgtccttctgatgaaaacgaaggttttcgttaagccagatgagcagagctaagtttacttaagctctgccatggcgagaaaacgtgccatgaaatggaacttttgtgttaccatcgctattctcaatgccaacaatcaagtcaccaataaccgccacgccagggcgataaccagagaacttcttgtatgtaggctttgcatcatacttctcaccctctttcagttggtcagatgcaaacatacaattgagcagtaaagtattgagagtgtcagccgtgttgaaatcgtagttcttacccgtatctgatgtgtatgagatgttttcttgcgtcagttcctttatcgctctgaggatagtatcagaactacaagtatgaagtgtcggatgaagcgagagatggttcatcaaatgagtagtgacatcctcaatacatgagccaccacagaagtagatactcatgagagaacggatgatttcgctgtactgataacctaacgatctacaccttagaccgagggttgagtcgattacagatgacaatgtggagtcaaattgctcatcaggtagggcggaaggatttcgaggaatttggacgacgcatagggttgggcaataaattgataaagcgtgagcttgatgagtttgtcaaagagaaaccattggtgcaagtattgatagaccgttcctttttatcggaagaactgaaaaagtaatataggatgtctatggggtacaggtgtaagatgctttctttctgatgaagggcggataaagcattcttcaggaaagtacttctccttttcccataccggtcataccgttaaaactgattgataattatgacgcgtatgttggccggtatgcctatctttgtggcaatgaaaacagagaaaggattgattttgtaagtattatcatggcaaaagaactgattcgtgtccctagggtgcttggggaaagctataattccgtgctgattgaacggttgtatgaggcaggtggaaatgtcatgctcgatctgatcatatacctgggcagctatcacctcaaagacttgttcgggacttcctggttctccgtagaagacttctgccgtaagatggggtatgaccgtaccaacttgcagcgcaagctggatagccggcagctcgcggccatgttcggaaagaatatgcagccggaatatgtatgtaccgacacggcaggacagagaatcagccatcctatcgagacggtttttgaggcggctctctataaactgggattggagaacctctgctatccgaccattggcgaggatggccgtacatcctataatttcgtgcagatcttgaaacgtttcgacataatgaccgatttcaagacgaagaagtcaacgaaaaggctgtactcggcagtggtaagcccggagataaagaatttcatgttctcgctctataacctcttggaacttcaggattaccgtagcctgcccagccgttaccgctatttctatctggaactttccaagatggtttacctgatcaagtataagaccaccaagaatgaggctcctttttatgtgctgacagtcgatcagctggctaaaaagctcggcatagagattgccgaacccaaagaccggaaaaagaaggtcgcctcgatactgaaaaagatgaatacttacctgaaatataccaatttcaatttctcttttgtgaaaggcgatcatgagagatgggcatataccgtgttgttctcgtttcctaggcatacgctgcactattttgatgaaggacaatatgctgtcgtggtgaagaaattctataagaacctgcttgggctgtatgtcgagattgcctacccggacacggatatggctgtcaggaggaagaagatcaaagaggtggaggaagatgccggactgtataaagagttccttttatgggcaaactccccggaaagcgtagaaaagaagaaacagatatatatcagtgatttcgtggctgtattcggcaggtttccggaaggatgggcacaggaagagttggagagtgccaatggaacggaagttgctcctgctcctgaagagttcatatctccggagacggacggggcggtgaacatggacgatccagctgtgtagaaccgtccacgtttcacggttttttatagaattagttgtgtagaagtgtccctattggggtgattagatgtgtggagtcatccgctttgcctgttttagttgtgtagaagtgtcccgtttgttgcttctagttgtgtagaaccgtccactccttttgctttagttgtgtaaaagcgtccggtttcacttgtcagctgtgtaaaaccgtccacccgttaatgaagggaataggtaatccctgttttttttatatgtcggtatatcagtgaaataaaagagagaaatttttaaataaaaggtatcggctgtgtaaaaccatccaccaaaatacataataaagacctaaactcctaacccctttaaatatccccaaagcgataacatagaaatgactgggaaaataaattttcccttcacatgccctatacgtactttcggaaaaagatttttcggaagtatgtgttgattttcacgcttttttatatgattggaaggcggttctgttcatcttctgtatccgaattagtttttcagggcgttcccttctgaccgggctattcgttgcaagtcctcgttaccctccaggcctttccctgctatccctaacgctctacgctccggctatgccggaagagaggtatgatgattttttcctgaactgataggaacattgcgaaggtaggcgtggccggaacgcccgatattgaaaagccaaatctccatcctcccattccgggaggtagtatttaccagttcaatcccgttctgatccgtctttcccgctttctcttcaatgcactgttcccaatcagttgaggaaaaatttatggttggggcgacaagcgatgtttgcgagtattaatcttttaatttttggcagtatgaaaacgaagagaaccgtatttgaagtgaatgacgtttatcgggtgatggaaaacagcgagttgatttataccttgacgaacagtgagaaactgaaacgtgaagaatataagtatgaacagatggaaatagaaggattgtgcttgtctgatgtactggaaacactaacacccagccgtaaaaaagtcgcttatgcggcgattgagctatataaacggctgaaagaagggcaagttgaaagtcctgcgcttttatccagcaataatgtttataaaatgatgcatcctgttttgtgcgatatagctactgaagagatgtgggtgctgttgctgaacagttcgtccaaactcatccgtaaagtccgtatctcatgcggcgggataaataccgcccctgtggatatacgggttatcatgaagcaggcattgtattataacgccgtatcttttatcatggtacataaccacccatcaggagcacgcaagcccagcagtgcggatgaccgcttgacggaagcagttaaaaaagccgctgaaacattagacatccgtttggttgaccatgtgattgtggcaggcaataactattatagctatgcggacgagggaagattgcaaaataggtaaggtggacgggagaaatcccgtctgcccgggatttcggcttcggggttcttttttggcagtcaccccaaaaaagaaccaaaaaaatgcttcccggactatcggatgcgacatcgtaaaatacgcaaagacgtggcttttcagaataaatacatatcttcgcgccaaaggtgatcggaatgaatgtattttctacttttgatacaggcgttatggtggctctcttactgggcattgagtttcttagaagtgatatccgaacgattctctattgtaaaaggaatgatcccaggattcttaagagttgcttatatacgctgcttatattattgaccagcctttattctattgtggccggagccatgcttcatccggaacccgtacctgtttatgagttgatacccggttttcaatatggggtttatggcttttctttttcgtttatattgctcgctgttgcatgtctttatcgtaaaacattaccttttgtccttttgggctacgctatgatatatgtgatcggtgtattgataccactacttaggtatgtagtgtctatgatggattatttcactcgcacaagggtatagcaggttaatttcttgattgtatcggattgccctttctgtgggctgcctcccccggcttctttcctccgatccgagtccggctttttgctcggcaaaggtttcgggattccgcaaatggcaagttacggccatgcgcctttactgtatggaaaataacgatgaagaagtgtcttcccgacattttccataagtgaaacttggcttattgcttgcaatccagaccttgatatgccgaaaaaaggctcagaactcagatggggaatgacatcaaaaaaaaggtcggctgaccaaagaccttcccgatacaaaaaatgaaaaggtcttgaatctagctgaagaataaatcagatgttcaacttaaataatgctaatatggaaaatttgattacacaaatcaacaaagagagattggttaatagcgacacagctcttatgatgaaggaattatactattacgtgccttgtgagtattggtatgacaaacaggataggctacgcaccgatattgagggaaggaataccccgatgtatatgtgcgagtgcccgacactggcagcatgtatccaatggatgatacagactcgtgaatatacgtttcaaacagaacaaaacgtggcggtctggcatgtggttgtgagggctggagattatgtgttgtatgactccgaaagtaatgcggacgctttttgttgtttggaagaagcattggaaaaagcggtacaggagtgcatggagttattgtattaaaattaaaaaaaatcagtccccgtgaaggggactttcctataatcttgctgagaggtggaattgcagacgatctttgagaatcatctttgaaggatgggcagaggtttattcgttatttgttatttttgttctcggatttcagcgcaattccattccttcttaataggcgatatactgttccgctactgcctatgtttaatattttctgtatctcccttaccggcgttccggattcatagagttggatgcagcttttctgcttggcgatgttgtttttgttgataagtgtctttctgccgaatttgacacctttttccttggcgattcttctgccttcttgggttctctcatagataaggtctctttcaaactgagcgaaagcaccgagaatgttgttcatcagttggccgattgcgccttccgtactgatgttgtcttgcagtgaggtgaattggatgcccctattcttgaaatcttccaatagcgtaaggatattcttcagcgaacggccaagccggtccagcttatatacgacaagtgtgtcgccttcccggagaaagctcaggcaggcatccagttccgggcggttttgttgacgtccggtcattttctcagagaagattttctcgcatccggcagccttcaacgcttccagttgcatatccagatgttgttccttggtggaaacacgggcatatcctattttcatcctgttttcgtatttaaatgtgtaatgaaggttttaattcttcactttttcaaatatgaagacattaattcttcatattcctcacggctgtattggttgaaccccttttgcttcattgccaaaagaagcctttccagttctccgatagtcactacctgtttgccgataacggtaaattgttcccattctcccttttcgttgagcaggtattcccggtgtgcaaaacagtaaagagaaccatcgatgtcattccgtttctgccattgacgcaggtgcttcaaactggtgaaatcacgggtgacagtacgtggaatgggaaccaatacgtcaatttccatcttgaattttatattctcttccgcttctcgcatgggtgattagcttatttcataatacatcaattatcgtatgggcaggaagttccagtttggagaaagcaaacattttcttgcccaaatcctttagcgatgccccaatatgatatacttccgtattatcaatgattaagaagcggtcatgactacttttgtaggttctagcttcaatgggaggatattggtcattgtgtttgtttaaatcaagttggagctgtgcgtttattttgtgtataaatagtagctgatactccactgtttcgtttgctcaacatgagtaacacggattcatctacatagttgtcgataagcacaagtgagcatttggcagactttattaaatctgtagcaaacttatacgcatcgaatatctgaccgtcaaagaatataccttccaccggaggcaatgaggtgcgtacaaagaagtctatctttgcatcatgttcagcaatggttttctctatttggaagaatctattgttcattctatattccatgtcattgagccgttggtttatagaataacctttcaataaatattcttttaaaattttatttgcccattgcctgaattgcgtacctcttacgcttttaactctgtatccaactgaaattattacgtctagactaaagaacttgacaggcttatcggaattagcaatgtgcaaaaaatgcacattgcttttctcttccaattccttttccttaaaaacattatttatatgtttggtaataacggttctgtcacgttgaaaaagttctgctatctgcgcttgtgtgagccaaacggtttcatcttctaaacgtacttccaaccttacagcttcatccggttggtatagtatgatttctccttgcttctccattatatgtttcgcttttattatattgttgcaaatgtacgaaaaagaaacgttataaagtctgttttttccgtaagtattaccttaaaaatttgttccctttttattttaataaaacagaaacattctgctgttttaaaaatcagttatctgtttgctattcatagttagggtatcaaataactaaaattcaaatggaaacgcaaatctatattttatgcagatttgtttgttagaagcggagaaaaggacacaagacatgataagaatcataggtcggggagcgccgcacggcaaggggggcactagcctcccgacgagtgcagccgttggccgggttatcggtgaaaatggaaaaaagttggcttttcttttggtattgttataactttgtctatatttgtgttgtgataatcaattttaaagttataacattatggtaacaaacattattcagattggaaacagcaaggggataatacttccttccgagatattgaaacagttgcgtttgtccttgaaatcggctgtgagcatttctttggacgggaacaatattgtgataaaggcacaaccacggcagggatgggcggaagctgccaaacgtgcccatgagaatggggatgatgagttgcttatccctgatgtgtttgaggatgaaaagtttgaggattggacatggtagaacagtatggagtgtattgggtagagttagaccctacccgtgggggtgaaatggcaaagacacggccatgtgttgttgtaactccttcagatttgaatatgtaccttacaatagtagtcattgctccgataacctccaccataaggaactatccttaccgggttctgtgttctgtagccgggcgtgatggggagatagccacggatcagattcgcacggtggacaaaagccggctgaaaagaaagattggagatttgaatttcagtgagataaaaagactgaaggaagtgtttcatcaaatgttctgtgaataatggaaagtgtgcaaataacaggttatgtagcgtattcaaaaaagatattatgaagccaactacttatattaattgggacggtctgaaagacattccattcttctactgcgatacaaaggaagatgaagaaaacaaggatttcgacatctattaccagggcaagctggtgttgcatgactacaaccattgcggacactacctttacactgctgcgctgctgttcagtaaaatcagaaacattacagccgactgggtgaacctgcataacctttggattctgcgtgattgcgtgcgcgagaattacaatcacggcataggagtggacgaccttattttcggagagaatttcgatggcaagaacctcgatacactcacaccgcttaccaagaaacgctttgattatttgtgtaagcggattaaggaacttgacccatacgcaacaatttaacacttcattgggcgaaggcagggcttgctgcggatgccagactttaaataatccattggattaattatctttgcacgctaattttcaaattataaagaaatgactaaatcggaaatcgtaaaggaaatatctgccagaaccggcatcgacggcaaagcggtgcttgctgttttggaaggattcatgaacgaggtaaagacttcgttgggtaaggaggaaaatgtctatcttcgtggattcggtagtttcatagtgaagaagagagcgcaaaagacagctcggaatatctctaagaatactactatgattattccggctcataacataccggcatttaaaccgtctgacgaatttttgaaaatggtaaaacaacagaacgcataataggtaaacacaatgaaagatcagttacgattattgagagactgtatcaataatgatcgtccggcagttgtctttcagggagacgatttttgcgctcctgagattttggaagcagcaaaagaaatttatcgtaaacatggttgttccgaagaatttctttttgactggcagctgcttatcaatgaggtgaaggcttaccagttagaaagtccggcaactgtcaaattgccgaaactctccccgacagaaacggaactggtgcgggaagagatgactaaacgctaaaaaatattctcgtttaatacgcaccttttattcttcaggcagcgtattgaacgggatgggattaaaatgttggcgaacctgcttttttcgaaagttcctgccaatagttgaagtcactcggtgaaagatgctcttgcatccagtcacgcataccaatatcgtttctttcgttcacatatctcgtaaacggaatcattgtcttacatgcttcaaatccaagcattctcatatggcgtgaaatgttgggaggaagaccttccaaccactctttataatacattatcaatctgttttcttggattggaaccgcttgttggtggtaaatatagctggcgtttccgattctaatatctctggccttattttcccgttcttcttcaggtagccgacttaaatattcagcttgtgctattctgcatttggagtttggatgttccatggtattttatataattaagactcttcaatgatacggttcatcaaatcacatattttttggcagctatgacggtctgcgcaagcaggataggggcatttctcaaaggatgcctgattatccgtaactatgaaacctccggaacgacgtacataacttaccggatgaaaataaatatcttcctttttcggcctataagtacatagtcttataaggctgttcagctctttgcaaatttgctcacatttttctttgggataatgtggcaaatcactgaatgcttcgtaggggacaaaggcaaatgctttgtcatcccacatgacaggtgtgtaattctgtaccatttgttatttggaataaggatggctggcagattccgtatttctgtatcagttaggtaatccgtcactatttaagtgcgcctgggcaaactcccggaggttcgtttcggcaatgcacttttcataaatctcatccaatacttcttgcatattttctactttattgaattttaaggggctgccgtttgttgcggcttgcctttccagttgttcgatgatactgggaaatatcccacgcaataaaccgacggtagctacggctgtagctggttctacctctattgtaatctttttcttttccatatcgttgtattatgttatcaaaagtaataattattaggatattggtaagcatttcttctgaaaaactttttaaagatattgttttaagatgacatactgtgtttttgcgttcacgcagtattctttcccaccctccccttcatcggaatgactgttctcatttccggtttacccgtagtcatccgctatgcggctgattatgggcaaaccagaaaagagaagttccaaacgtgggcgggattgcaatggtcatcatccggagcttcggcattgccgaaacaacctccttcttccgtattgcagccccgtccttttaccgtttgtcccggcagtccgttgctaacccgttcccccctgccacttgtggcagggagataggaatacggttttgcaggcaaaaccgtatggcttgttttactttccgtactgcccttttcctagttttctgcctcccttaatgtgcgtttttcatagccccatctgagaccctttgtttttgaacggcaaatttatttcggtggatggatacgaaagagttccggtcttcgccctttgtcccgaaaaaaataacgccggacggcttcgctgtccccaacattttttgtcgtccaaaacttttcttaatccctccttccttattgttgtgtgccgtaaaaaaaaggctcataaactcagatggggcatgaaagctcaaaaaaaaagtcggcagaaagaaaaggccatcccggaaaggggttttaaaaaaaggtctttaaatctagctgaagcataaaattagaagtttaacaatcccaaaaaacaacgagttatgtcacgagtacactatttagaaggagattatgaacagttagttattaatgaaacgatagacggtcttttttccagttatcgtatagaccgcaattcattgccaaaaggatttttcctttatgagattagatgggatgacagcttatcttcattggcagagattagcccctctgtggtggtgaatcatgcaggttcattcattacaaagtcaccccttgaatttgatgcaaacaatagcatacggataacctataccaattttatcgagttctgccagtttggtgagtgggcttatgagaaactggctgtattggattgtaattccggtaatgttgcggtgataagcccagacaggagattgcagaccactgaagagattgagatttttttgagtgggcattgtggctatcatctgagtgagattaattggatggtgatgaaaggcgatgtgctgtttttgaacgagaacgatttttaatgagtataaccgtaactgcctcttggaatggggcaattacataaaatattataagtatgaagtggatagataagatggtagaacgcattacccgaaaagaaactgctttaaatgaccacttttgtgtaaatcggcatacggttgtatgtcagagtggtatgactgattatgtttctgtaacgattgataataccgatggttttgatttcgatttttggacaaaacaactttgttttgagaaggactgtaaatatcgctcggagataaaagcggcttttgataaaatctatggcacaaggaatatagaatgttgtgaataatgaagtcagaaaagtatgataccaaaggagataatgaaactttatgaaaagcttgctttcagtcggggatatgaagaagcctttcgggattttttggatgtttgtctttactatttgtctgtcgggatgttggcggaggattatcgtagagtggaaaaaagatataagccatatgaaatggaactttttgttcaaatgttttatagggtgtctgaatattcggaaggattttgcgatgtcttgggagatatgttcatggagtgtgtcagtcatgggaataacggacagttctttaccccgatacacgttgctgatttgatggcatgtatggggggaaataggctgaaacctaaacagtcggtctgtgattcgtgctgtggttccggcaggatgctactttccgctgtaaaaaaatgtgcggaagagaatgatggaggaaggcttttttgttatggctcggatatagatttgatttgtgtaaagatgaccgttgtcaatctgatgatgaatagcgtacccggtgaagtcgcatggatgaatacattgacaatgcagcattggagaagttatcatatagatttacagctgatagccggagtatggttgcctattttaaagataacggaagcaggtgacacttcttttattaggaaacttgaaaatgcaatggaggataattctgaattgaagaggtcgattcagagcaacgcaagggctacgcagctgacttttgatttttgacaagataaatatgtaaaaaggattttggtatgaaagcaataagaacaaaagaggtgaatgagaacgtcaaagcggcgaacagttgtttgcgtaaagcgaaatggcaggctaaggaattggctgtttttacaggtgaagtagtgcgtctgatggataaggaagggcattctctacaagggttctttaatcgggtggagtttgttctggtggacggcactattaaattccgtgtagttataaatcctattcttgaatgtgagaactgtataatggcttcttgccatgaagactatctttatgaggtggtctcggtggaaaagtttacctataaaaattataggtatcatttgtaatgatattgtattttaatgattataaactgatttatattataacaatgatgggcaaaattaataatattcccgttttgaatgaagatgttattcgtttggttgtactcaatgaggaaattattgggtatatctatccacgaaggacttcttatgtggtggcattggagataaagccgggacgtactacctctttggctacatctgtcaataaacaatgcatggttttgttgagtgataaggttcgtttggccacggaacaggatttcgatgattttcatatatgctttgatggtttcagaaataacactatgtattgttataatcagggaacggaacctatataccttcaatgaagcacattctcccttcttttggattagggaagggagggtattttgctgtccgctactttttggcaagcaccccaaaaaagtagcaaaaaacgcttggagttactggtaatcccattaatttgcgttcacgcagtattctttcccaccctccccttcatcggaatgactgttctcattcccggtttacccgtaatcatccgctatgcggctgattatgggtaaaccggaaaagagaagttccaaacgtgggcgggattgcaatggtcatcatccggagcttcggcattgccgaaacaacctccttcttccgtattgcagtcccttccttttaccgtttgtcccggcagtccgttgctaacccgttcccccctgtcacttgtggcagggagataggagtatggttttgcttgcaaaaccgtatggcttgttttactttccgtactgcccttttccttgttttctgcctcccctaatgtgcttttttcatagctccatctgagatcctttgtttttgaacggcaaatttatttcggtggatggatacgaaagagttccggtcttcgccctttgtcccgaaaaaaataacgccggacggcttcgctgtccccaacattttttgtcgtccaaaacttttcttaatccctccttccttattgatgcgtgccgtaaaaaaaaggctcataaactcagatggggcatgaaagctcaaaaaaaaagtcggcagaaagaaaaggccatcccggaaaggggtttaaaaaaaggtctttaaatctagctgaagcataagtttaattttaatagataaaagactatggcacatcagagtaaatatcctagtttagacagacaatggcataagatgatgttttctttctttgagtatcttcctatgcaatatcggcaggcaacggaaagagaatggcaaattcgtaagatgatatggagttttaaggatggaaaagcttatttgaatatagcttggatgatagcgaataagttacatcaagtttttggtgatgatgttaagaatattgtttttgcttgtgttccggcttcttccgctgataagaatgaacttcgttataaggggtttgcttcggctgtgtgtaagttttcaggtgctatcaatgcgtatgaacatatacgtgtcagtggagatcgtttggctattcacgagaaatttgacagcaagtcgcttcaaaaagtacaagtgatagaatttgacaaggacttttttcggggtaagaaaatcttggtatttgacgatattttaacaaaagggttttcgtatgctcgtttcgcatgtcagttggaaaaaataggaggtgaggttttgggaggtttctttttaggtaaaacagttgtccgtatgttataagatgaaagaaaaagagagttatatagagaagcagaaggatatctttggagatactacttggttcacttatcgttatgaggtgaatggaatggtgtatgaaacttcggcaggttcgttggatatatgtagaaaggcacgtgataaatggatgaaaatgatgtccgttgcttttaccggtcatagaacgatacgaacaaataaatatgctttgtccgtatcgttgaatgaagaggtacgtttctgctatgagaatggaatccgttttttctatattggttgtgcggttggatttgacatgatggctgctcataccgtacttgaacaaaggaaacaatatcccgatatggttttggtggcggttgttccttatgtcgggcaagatgtgtatttcaacaaagaggacaaacagaggtatgctgatattttgcgccaagccgacaaggtggtagttctatccgaatattattatgcccaatgctatgcccaccgtaatgattacatgatttcacacgcctgtaggctgattgcctattgggatggaaaatctgccggaggaacttcttatacgtttaacaaggcacaaaaaaagaaattggtgatatacaatctgttttgattcagattgtatatcgttgttttccagcggtatgatcaaacgtggcgatgtcatactgtctggttgctgtaagtgctaatacttccgatgcaaaagagaaagacacaataaatatgaaaagcaatgatagatgaattttacttaattgttttacctttgtaaaacattagtgtcccattaaaattgggacgaattaaaaattaaataaacttggcccatttggtccgaatcgttctttgtcattttgaaatttagttttatcaaagaggtctctcagatgagtcttatcagtcaatgagatgctcagtatttgtaacacttcatatgtacttctgttcagttgcatatcgtgttgaatgattgccaccaaacagtaagcgcatatagcagcatatatctgtattcgaacagcattctctgtagttccccaaaatcttttgattttaaggtgctgcttgagccatttgaaaaacagctctacctgccagcgatttttataaagttcagcaacttgaagcgcagatatatgcatcgcattggttatgaatgtaaattctcgttcttgttcttcatcccaatatttaaccaatctaagtggctctggataatattgtttaggatagaatcctgtcagaaatacacttgcgtctgaaagcacattcttaggcagcctacgtttccattggatggatttgtacccgagattcttttttgctctgacaacaaagtaggcttcaatttgatgaattttatacagtattttgaagttgttataaccgcggtcaaagatgtaataagagcttggttcataaggaatttcaatcataactttagaatcgtgtacggatgcttccgtgatatgaaagaatgcaggaatctgtgtttccacatcatataatgtatgcactttgataccacctttctttttgcggaattttgcccaccaaaagactgaaaggcacaggtcaatagtagtcgaatcgaaagcataaacgttaccgccaagtttgaaaatatgattagcacacttttgtcgtgcttcgctaaccaggtagtaagcatattcttcaaagatgtgatagtctctatcttgatttgctcttgccagcgatgactttgatacatttttacccattcctaaatgataacatttggaatgatgagcttcaagagcaactatcaaatctcgcagactttcacgattagaaagttgaccaaacatcaaagcaagtagttgattccagcaggtgaagtgcttcacatatttatcaccatcatacttggtgactatgcggttaaacttacttcgattcagaaatgaagccaattgagcgaaaacgtatttgtcttggaacatatgccatcggattaatctgatgcaaagctacaaattcaagtccgttcgctcggaaaatcgctgtaactaactaaatttcaaatatttcaaagaactcttttagattttaatgggacaacaatgtttgtaaaaggtaaaacaatatgcgtttttcagatacagagaacaatatgaccttttgcataggtgtgtgttggttaggaactccaaatatggagtcgttgcagaaaataatgatgaacttgaatattattgataaggatggaaacaatggaagctaatgaactgatgcgatatgcctatgaattactgcaagggcattcgaatgaagaatgtgcccgaatattaagagaagtggtggccgagtgtcaggtgtgtataaagaactgtgaagaaggtgttttcgaaaatatgctaaagtaataacaacaagaatatggaaattactcataaaaatcaaggagaacttgactcaaccatgctcccattcgtgatgagagagctggtagaactggtcatgaagaaaaaggcattgcctttaggcgatgcactgtattatatatattcttccaagttgtataaatctttgctggataagagtaccaagttatggtattcaagtacattgtcgctttatgaaacattggagaaggaaaaaacagaagaaaaacgacggtataacggtgacacgaagatcctgcttttcaagatgttctgcattgagaattatagggaggaaaagaaacaaagtgcggaagaaaccttgttgttgttttcggactatggggtttttgattttttggatgagacttttgaaatgcttcatacccaagaccccgaatatatattagatactataacgacttatatcaataaaagaaaatgagactatttcatggatctacagttaccgtgaaacgccctaatatacagaaaggacggaaggctacggactttgggaagggattttatacgacaaccaactttgaacaagcaaaaaaatgggctttgttgaagaagaacagggaacagagcgaaaaagcaatcgtctctgtttatgaagttcccgatgatattcttgatagggaatatccggttcttcggtttatgggtgcaacaaaagaatggctggagtttgttgtcaacaaccgcagaggaagagaaaacggtgactatgacctaataatggggcctgtcgcaaatgaccagttatatgcgacaattcggctttatgaacagagagttgttacggctgaagccgctattgagatgctgaaagcgcataagttgttcaatcagctttcatttcatacggtaacagtcgctttgttgttgaagtttgttgaatcaattgaagtggggtaaagaatatgtgaagtgaaaatagggggaagtttatcccccaatggtaaggttgttttttgcgtccacttagttttttcccacccaccctttcagcggagtgactgcccggcagtctgttgcttacccatatgtcctagccttttagggctgtagataggtagttggatatttcgctgccaaatcggcagtccgcttcaatcgtttgcttgcttttctccgagtggagcctttctgcttttccggtggtgtaatcttcttttattggaaacaggtgtagtggctgtatgcctgtgtggttatgttctcccgcagaatccgcaagtcagttcttccgttgcagcttttcattttatcgtgcagtcacttttttcgatacgtggaatatgatatgcttcattcttcggcttcatttttttaaaaggaattgcagatgtttcttccggtgtgtcgataggcggctgaccatcttttcgggatgtgccatgcttgctgtctaaccggttgttttttgcatcctttccaaacctgttactgattttcaagttttgtctttttcatatcattttttagggaagtcaaatcattttccgttgcaaatatagattgttgctaaccccttttacggggataaggggacgattcacaaacaccacgttgttattcgtctgaaatcttcctttttttgccttgcacaaaaagcgtatttaacccgaattattcgttgccatcttcaccaataaaaaagttacaaatcttcctttttccggccagcataaaaagagtatttatatcttttttcatggtgtcccccaaagccaacaatcagttattgcactgtaaaattgattaattaacttctaaaaaatcagagatatgaaaaagattgaaaattcattcgcagtaacaggcaggatttgtagggatgcagaaatccatttattcgaaatagtaaaggttgcacacttctctattgtggtcagtcgcataggcaagataaatgaagaaaaaacatttgtttcctctgttatgaaagttgaagcctagagtaagatggaagaccgctatgctttttggatactgcaaaaagatgtactgattaccgttgaaggctactttaagccggaagaatggacggattctaaaagtggggagaaacgtaaccgcattgtgatggtagctactaagttctacccgactccggaaaaataagaacccccggactaaaaagaaaaagcaatcaaacgattgaagcggcacaaggtcgcttcaatcgtttgctaatgcggcagaagattataaaaaaagtgtttcttaatttggtgattttcagatttatcggtatttttgtatcaaaaatgatacctaaatatgtttttctatgaaaagattatatgatacatatacaatatacgaattttcagatgaatgtattgtaaaggaaatctgcaagagagttaagtctataagacttagctgctgtttttcccagcaagaatttgcggataaggcaggagtatctatcgttactattaagagaatagaatcttgtaaagtaagtgatattgccctaagtacattgcttaagattttgcgtataagtggaactcttgaaggcgttgtcggtttggttccggaacttccagactcccctttcctaatcaatgaaaaaacaggtaaaagaatacaaagaattaacggtaaacgtaagatggtatgaagaaagagccgattatagtgaatgtatatctgtgggggacttgcattggcaaattgaattgggactttgaaaagcattgttctgtattccaatttacggatgaatataggaaacaagattatgatatatgcccttccacacaccctaagagaacccctttgtttgcgtctttctatgggaataaagataaattatatcaagggcttccggaatttcttgcagatgcgcttcctgacaaatggggggcttccctatttgaccaatggctcacggataataatataaaggttacggaatcattgcctctattgaagctctcttatattggcaagagggctatgggagcattggaatttgaaccggaatttaatgatgatgccatccatgagtcagtaaatatgtcatcattggcaactttggcttctaaaatatataatgatcgagatgctgctgtcatatcaccggaggatagcctcacgatgaaaaagttgatatatcttggaacttctgccggtggcatgcgcccgaaggcagtgattgcctataatctcgaaacggaagagtttcgttccggccaggtggatttgcctgaaaattttaagcagtatatcatcaaatttaaagaagcagatgactctcctaccacagagatagaaatggtatatagcgaaatggcaaaggcggcgggaatcaacatgatgccatgcttcctgaaagaaattgatggaagaaatcatttcgtaacggaaagatttgatcgtaagaatggagaaaagctctttagtcagacccttgcggccattatgccgggtgcagatgattatatgaagctgtgttggatagcagagactctgaaacttccccaggaagacaaagatcagatatttatcagaatggtatttaattatgtcgcaggtatatccgatgatcataataagaacatatcgtttatcatggataaggcaggggtatggcgtttatcacctgcatatgatgtaatgttcacggcaaatacatgggaaaattcttcagcacacattcattcgatgggcgtgatgggcaaaaggtctgccttgactacaagtgatttcgtcaactttgccgaggattttgtagaggagcccgaaaagaagatattacaggtgttcgatgctgtaagcaaatttcaatcgttatgcgccacgtatggcatagataaggctatatttgataaaatccaacatgtattggatggattggtcactgatgatttggatttgctgcaattaacttaaagaacagtagatggtgatagttgctccagtcttttctggaacggctttcttttcttttgagatctttatacccctatttgttattttggagaaagtcacatgtttcccacccaccctttcagcggagtgactgtccccgtttcaggatttctcatagtcactcgcaggctccgtgattgtgtgaaatccaggaatggggaaggcaaaggagagaggcatatccggtctgctttcggagcttcggccacatcgagacaacctctttccggcggctatgccactctccttttatttgcccggcagtctgttgcttacccatatgccccagccttttagggctgtatataggtagtcggatatttcgccgctaaatcggcagtccgcttcaatcgtttgcttgcttttctccgagtggatgcctttctgtttttccggttgtataatcttctttttccggaaacagttgtagtggctgtatgcctgtatggttatgttctccccgcagaatccgcaagtctgttcttccgttgcagcctttcattttatcgtgcagtcacttttttcgatacgtggaatattgtatgcttcattcttcggcttcatttttttaaaaggaattgcagaggtttcttccggtgtgtcgataggcggctgaccatattttcggaatgtgccatgcttgctgtctgaccggttgttttttgcatcctttccaaacctgttgctgattttcaagttttgtctttttcatatcattttttagggaagtcaaatcattttccgttgcaaatatagattgttgctaaccccttttacggggataaggggacgattcacaaacaccacgttgttattcgtctgaaatcttcctttttttgccttgcataaaaagcgtatttaacccgaattatttgctgccatcttcaccaataaaaaagttacaaatcttcctttttccggccagcataaaaagagtatttatatcttttttcatggtgtcccccaaagccaacaatcagttattgcactgtaaaattgattaattaacttctaaaaaatcagagatatgaaaaagattgaaaattcattcgcagtaacaggttttatcggtaaggatgcagaaatccgtagttttgaaacagcaagcgtagcacgcttttctatcgcggtcagccgtgcagacaagacaggtgaagaaacctcttatgtttccgctttcatggggattgaagcctggagaaagaatgaagcactggattccttcgatgtattgaaaaaaggtgagctgataaccgttgaaggctactttaagccggaagaatggacggattctaaaagtggggagaagcgtaaccgcattgtgatggtagccaccaagttttatccggctccggaaaaagaagaagaaaaaccggatcagcctaaacagaaggctgtctctaaaaagaaaaaagcaagcaaatgattgaagcggcctagtgccgcttttttttgctacatatccgagagtgtttttgcgttcacgcagtattcttccccaccctccccttcatcggaatgactgttctcattcccggtttgcccgtagtcatccgctatgcggctgattatgggcaaaccagaaaagagaagttccaaacgtgggcgggattgcaatggtcatcatccggagcttcggcattgccgaaacaacctccttcttccgtattgcagttccttccttttaccgtttgtcccggcagtccgttgctaacccgttccccccctgtcacttgtggcagggagataggaatacggttttgcaagcaaaaccgtatggtttgttttactttccgtactgcccttttccttgttttctgcctcccctaatgtgcttttttcatagctccatctgagatcctttgtttttgaacggcaaatttatttcggtggatggatacgaaagagttccggtcttcgcccctttgtcccgaaaaaaataacgccggacggcttcgctgtccccaacattttttgtcgtccaaaacttttcttaatccctccttccttattgttgtgtgccgtaaaaaaaaggctcataaactcagatggggcatgaaagctcaaaaaaaaagtcggcagaaagaaaaggccatcccggaaaggggttttaaaaaaaggtctttaaatctagctgaagcataaaattagaagtttaacaaactaagtagcagaagtatatgcaaatcattcaatttgttttttcggtcatcatcgctctttgtgcagtggctatgtttgtcggagcggtaataacgccaagtccgataaaggttgtgtcggttacgttgttggctcttatttgcctattctccttgtttctcgtgaaattggcttattgtgaaatgaaatctaaaaatgatatactatgaaagtgtcagaacaatttaaaagtaccatcaaggcataccttgataatatggcagcggtggatagtctgtttgctccagtctatcaaaaacctacaaagaatatagataattgcattacctatattttaaaccaagtgaagaaaagcggttgctgtggttttagtgatgatgaaatttttggtatggcgttgcactattatcaggaagataatattgaggtgggtagcccattgaaatgtaatgtagtcgtaaatcatcatgttgaattgtcagaggaagaaaagaaagcggctcgtgaggctgctatcaaaaaattgcaggaggaagaattggcaaagttgaagaagcgtcaacaagctaaacgtgagaacaacaccgaagtacaaacccagttaactcttttttgatatgaaacccaagacaaaattacaaatggaaatcgtgaatgggagcaggaagttagctcccgtttcagaggctcaaaagcgttatgcctataaacattgctttgtgcattatttcaagcgtgatgcaaaggggaattgcttttgtttggattgtgggcatacatggcgggataaggaagataagaaaaactgtaaatgtcctcattgcggtatgaacctgaaattggagaatagcaggaaaaggacggctgtatataaagaatatttttgtgtgattactacatacaagcaatatcaagttatccgtttttttatggtggactgccggctgaaaaaagggtctccggctaattactttataattgaggcggtacagtgttggatgaataaagagggcaagacagaaacgctgtctttgctgcggggcatgtctatattttattacgatgcatggatatatggaagttctttggaattgcgtaagcggaatgtgcatcatgaccgtatttatgatatttgcccggcagttatctatccgagaatgaaagtgatacccgaacttacgaggaatggatttaagggtgccttttatgatatttgtccgagttccttctttatgacattattaactgataatcggatggagatattatataaggcagggcaaatgaatttgttcttgagatttttagagagaaaatacggtatagataagtattggacgtatgtaaaaatctgtttaagacatgactatgtgatacatgatgcggacttgtggctggactatgtggatatgctgatagaaaataaattggatgcgagaaatcctcattatttgtgtccgttgaatgtagaagaagcgcatgattgggtgatggggaaatgtaagaaaaaatattctgaaaaggatgaaaaagactatattgctgccaaatcacgtttctttaatctttcgtttgcggatggaaatattatggttcgggtattggaaagcctttcggacttttacaaagagggaaagttgctgcatcattgtgtattcagcaacgcctattataagagagaagattcgttgataatgtcggcaacggtggatggaaggcgcatggaaacggtggagttttcacttagcaggatggaggtgtgccagtgtcgtggaaagtctaaccaattatcagcctatcatgaccggattctgaatttggtacgggataatataccgttgataagggaaaggatggtagtgtaatgaatagcccacacatctaaatgtgtgggagttcttttttggaagacgcccaaaaaagaaccccaaaaaacgttgtcgctacacatcgttacgctcggattatttgcttgtcggctttagtttgccgatacatttttccatgtcgggggacaataggaaagaagccgtctttttctgctgcacccctgagtgtggctggacgatggcatacctgcattttaatatcttgccgataacttccgtactgtcacggtgcaggtacatggctttcatggcatccgttgctttcaggcttttttcggcttccatataggcggaaaaggacggtttgaataaggcacggggactttccgctttctgtatgacagcggataattgtgcgcttttgttgttcaggtagcacaggctgtccgatacggtgacgtcttctgtttccaacacttccagtagttcgaactttaaatccgtccaggtgccgtgagaatctgtctgaacccattccgcaatggccttctcatagccgggtttgctgcatgaggaaaaggcaatgagcagcatacaaaaaaataaatgcttgatattcatattgatccttaattccgcaacactattacaaatataactttttaagtacctgagcaacaaaaagttgctcaggaatttgccatgtcagatttttcacctatcttagtgttgcaaatcaaaatatgtatcaaacccgacagacatggcaaaggtagcaattaaatccgagaaactcactccttttggaggaatattttcaataatggagcaatttgactccagactctcatctgtaatcgactcaaccctcggtatgagatgcaggctgtatggttatcaatacagcgaaatcatccgttcgcttatgagcgtttatttttgtggcggctcatgcatcgaggatgtcaccactcatctgatgtaccacctttcgcttcatccgacacttcgcacatgcagtgccgacacgattcttagagccataaaggaactgacccaggataacatttcctacacatccgacactggcaagacctacgacttcaacacggcagacaagctgaatacactgctcctcaattgcctattgtccacagggcagctgaaagagggcgaggggtatgacgttgacttcgaccaccagttcatagaggctgagaagtttgatgcgaagcctacatacaagaagttccttggttatcgccctggcgtggcggttattggcaacttgattgtcggcattgagaacagcgacggcaacacaaatgtccgtttccaccagaaggacacgctgaagaggttctttgaaaggtttgaacaaaacaagcttattatcaaccgtttcagagctgattgcggctcgtgttctgaagagatagtggaagagattgctaaacactgcaagaccttctatatccgtgctaaccgatgcagttcgctctacaatgacatctttgccctcagaggttggaagaaagtggaattgggcggcattgagtttgagctggcctccattctcatcgagaaatggaaagggaaggcataccgtcttgtgattcaaagacagaagcggatagacggcgaactcgacctgtgggaaggagaatacacctaccgctgcatccttacaaatgactacgagtcttccgagaaagagattgtcgaattctataacctccgtggagggaaggaacgcatcttcgatgatatgaataacggattcggctggaacaggcttccaaaatcctttatgggagaaaacacggtgtttcttctgcttatggcactcatacgcaacttctataaattcatcatggcgaggcttgacgtgaagaggttcggactcaaagcaacaagccgcatcaagacgtttgtctttaagttcatctctgtgccagccaaatgggtcaggacatcaaggaagtatgtgctgaatatctattcatgcaacaatgcttatgccaatgtgttccagaatgactttggataacaccgacaacttatagtcgtgattttgcgtattgcctcaagtcgcatggtggggtaaggggcatttatatgtctttatggtgacattcgatgcactgtgccccctttttactaacgatgcagattcttttcgcttctgtatcatattaggcgcgtagttgcggatttgaggttgat

SEQ ID NO: 4 - DNA, 8943 bp, Parabacteroides distasonis
  source 1..8943: mol_type = genomic DNA
atggagaagaaagacaagaaacagagggatatagtcctgtcgcaagacaatgcgctgactaccgcacgctacaagttcgaccttatcgaaaaacgtgccctatactccattatacgaaatatccgggcgcaatacatcgagaacgagaacggcagacgggacttattcgatgatctgattatcaccatacacgaggaagaactaaagaaatgcggtgacaataccaagatgcaaaacatctacgatgcgctaaaacggcttagaaatcgcgatatagagattaacaacgaaaaaatgtggctaagtatcggttttgtcaattacgtcaagcatatcaaaaataaatcgtattttgaggtgcaagtttccaaagaggtactaccctattacgtggaactcgcccaaaacttcacgagttactccatgacggtagcaatcgcactcaaaagcacattctcgcaaaggttttacgaactgtgctgccaataccgaaacgccgggttctttttctacacagtcgaaaagcttcgggaaatgttcatgttggaaaagaaatacaaacggggatgcgatttcaaaaggcgtgtacttgacgatccgcaaaaggaactccgggagttgtacaatgccggacaatgcgatttatacttcgagttcgagccaaagagctacaaaggcaaggaagttaccgaatacaaattctacgtttacacaaggcaaaccgaacaacaaaagctattggaatacgaaagcgcaaaacaggcgatcatctacataacaaccactatttcgaggttctctaaaagtgacaaaggatatgttaagcgtgtagtgaacgccgtacagttacacccggaaatagccgtacaggtggcgcaaaagatacaaaagaagtttgagcaatatatagacaagccagccaaacagataggggctatcatccgggtttgcttaatggaagattttggtatagaataaaaaacatacaagtatgaaaacaggtgataaagttatcgtaccagccgaaataaacggctatggcagagatttacgggcaatagttacagagatagagaagttcgccggggcaatattcgtaacagtgatattcaccgaaccatgtccggaagcctgcggaagaggggggggtgtttaccatgacttccagctaatagcaaggtgatttattttgctataatcgcaataaattgcaataatatctgtgataaattgctataataatacttataactacctttgcaacagaatatagcattttacagcaatggagaaaggacaggaaagcaagcaaaagaggaaaacaccgcttaccaccatagcgataagccaagagtacgccaaaaaattagacgagtatttaaacggtacgggtataactcgcaaagaatttgtcgagttgtccgttgattatttccaaagaaccgggttcgacctccggggtgaagcttttgacctctccccattagaaaaggttgccgggcggctggaacaatccgcaaagatcatggaacgacacaacgaggggacggaagcggtgcacctgcttctccaagctgtccgggaacagaccgccaagcaactcccagcgccggaactgatcgcccatgctgccgaagaaaaagcaaaggcagaagccaaaagcgaagaacaagaaagggagattgcccggctgcgctccgaaaactccgctttgctggagtacaaagaaaaggcataccgggaactatgccggatacgtgatgaacaaaaaaccatagggaagataaaagtaaatatagagttataaaagaacatttataaataaaaaaatcatgaataaagaaattttatttatttatccttttgccggattatgcagcacatgaagctgtgtacttttcacaggctattacagctgatgattttgccatgaaaaaaaatccaaaatatgtcaataaggttgtcgcacccaccttagaaccaataagttcgattggtggattccgcacattacccgattattcgtttgacacaatgcctgatgattatgtagcattggtattaattggcggttttggttggaatacacctgttgcagaaaaggttatgccaattattaaaagtgctattgaacaagaaaaggttataggtgcgatttgtaatgcagcttcattcatggctaagtgtggtattgaccgagaaacaacatcaaaaactttgcagaagtcatccgtaatacagaaaatctcagtaactttgtcctcggtaatcatagcaattattgtctgtaaacttttgatatttaacactctaagattacaacaatttttcgctaatcaccatttttcaggcacttatatttcgtcgaactcacgttaaattatttaatatacatacaatcttggatacttgcttagaccttattgctcttcaatatacttgcatgattgtgatggccatgcttgcattttttgtgtttgtgtcgcgctactatgtaacttgccgtaacagacagtttgagcagtcgcgttggatgattgttgtggcattactattgtttgttgtacactacatgtgtcagatgcggttgggttggcgacaacaggggaacgatgtgggtgttctgtttaatctgctgttttattcgccttcggctattttgttgtcatggtcgcagcttaatattctgcgcgctgggcatagacgttggagttttatgcgctatggcgttgttggatatgctcttatggtattgtgcatagtcgcaggtgttatttcaaatggcagtctgcatattggtcctatgctatatgttgctgatgctattcatttctttactctattgtattatacatgggcaccgctgagggaacttggtaatgttcaacgtcggctcgacagtgaacatggtaatcctgcagatgcctacctgcgcactatgcgctttggtttttttgtggtgtgtgcttttgctgtaatttcgcctctttatatattgtcgcggccgctgctctttgtctttggacctttgggattgatttcgctttcgctgtttattgttagttttacggcgcttggatttagtatgtccgagggagtaactgagattgttaccgagactaacgacgagatagccgctgctaaagtctttagggagattgggcctgagcgtattgccgaaatagatatggcggtaagcaaatggcgaagcgagggcggttttagagatagcaacttgacattatcctcgtttgctcgtcgcataatggttaatcgtaccgacgttgcttcgtatctgacttccatatatggtaagaatttccgtacatggctttcgggtattcgcgtggaggaggcaaaggcactcatggctgcacaccccgaatatagtaacgaggttgtttctatggagtgcggtttctcgtcgcatgtgtattttcagcgtctgttcaaggaaaggacgggcttgactcccgccgagtggcgccgtcaacggtaatatactggttatgtgtgcgtttgctactgaatgtaaggtgtaacttttgtacgaaggttacataataaggcaaagtgtaacctttcttactgtgacgtatcctttctataagagtgacacacaagtgatgtctttgaggtttttgatggttgatgctcctgtatctttgcatgaggaaattcaaactattcaaatataaattctcaaaaacaattcactatgcaaaaaaactatctttatttaatggtgtgtgtcataggggctatgtctttagcttcgtgttccgaagattctatttctcctgatgctggtggcgatggcgatggcgacagcactaccgaagtgcctttggcacaagttgcaaaacccaaacctaacccttggcttgcacaggaagagtatagtattacgcacttcaattcggctcagactgatgctttctcgtctgctgtcaaggatggaactttcaatatcgatctttccaagtgtcagatgacatggagcggtcctgttaatttgatgactcttgcttcgacttcgcccaattatatgtggggtatgagtagcgaccgcgtgtcgtatcttgacataagcgacggcaaacttgaaagggttgccgaggctggcttgccagggattacaatgaagacccaggagcaactgacacgtataattgccgatcatgctacttacgacgaactttccaagacggttaccgatatattgggtccggcgccacaaatgtctatggccaacggtaattatgtcttgtgcgacaaggataactatgcttacaccaatgcaggtcaggtaatggcacgctatcgccttgccaatcctaataatcccaaggatggtatcatgttggatcatcagataagacttacgaattttaccttcggctcttttacactcgtaggcgctactatgacctatgacggacaccttgttgtggctgctcagaacggacttcttgtgctgaatcgtgctcttactacaatcgaagattcataccctcttccatcagaccagattctcaccaactctatctgcatcgacgagaatggcggtgtttacgtagcaagtaacagccgcacaccaggcggaaaaggccttatgcagaaactcatctgcaaggacggcaaaatctccacctcccaggctgatggtgcatggcaagcctattacgacggtggtccgcaagcaccatgtatcaaactcggacatggcactggttcaacgcctacacttatgggctttggccaagacaaggacaagctggtagttattaccgatggctctaagcgtatgaaactggtagctttctggcgtgacgaaatcccctcagacgcacagcaagtggcaggatacgacaagcgtatagccggagtgcacgaggttacatgtggtcttggaacatcaacagagtggatacagtctgagcagtctgttgtagtaggcggctatgacgcctttgttgtaaacaatattaatgttaccaatcaggaaataaacgacaagattattggtgtaatcgctattggtcctattgtcaaaggccctcaaggtgccgagtgtgtacgttggaatacaaaggagaaaaagtgggagagtaagtggacgcgcagcgatgtaagttctgtaagtatgattcctgccgtaagtatcaagtcagagatggtatttgtatgtggctggaacgatgcttcgggctgggaagttacaggacttgactggaagagtggtgccacacgtcaccgcagcatattgggcaagaacaaccgagccaatggtgcctacgccatcattcagtatcttgctaacggcgaccttttattcaactctgttgccggaccaatccgcgtaaaatattgagataatttaatcatcatataacagttatgtcaatacttcactaaaaaattaccgaagtattgtaatgacacacccgaacatattgaaatgttctatcagttccataaacaaggcttctgttctttattcctagatacaggtgataaataacagataagaaacagattataacaagcctccggcggggttttcgctgggggcttttgacctttgcacatataaaaagcaaaaagaaagcgatatcggagcgtataccataaaacagaccaccgactattacaaaacgatattacgtgcctaactgatcggggcagttcctccaccatgcggacaaatcccggtaacaaaatgacaaaacggacactcaccaaagaacaacatttttttcttttttcctaaacaccttccagcgaagcacagtgtatttgtcaagggcgaagggtaaaaaataccgcacgagcgaagcgagcacaggagattttttacccggagagtgaaacgtccctttacaaatgcggcgtgcggagttacctttgtgccggaaaatagaaaaatcacatgcccattccgaaacctctgctcctttttggcttcttcaggagttccagatcttcctcctgctgcttctttttgggaataggctgctcgatgtccggcgttttctccacctgttgatttttcgacttctccggctcctgccgggattgaagctctgctttgagtttgtcccatttctcctttctgatgcgttccgcacgttccacctgccgggctatttccgccggacttccgttcttgacggcattaagatagtcgaagctttcctccggctcccggtcaaaccccatgcgccgatcaaaagagctttcacacttccggaaaaaatccgtccggtcaaaacctcccttcacgttgccgcagttcttcttcccggtgtggttcgttttagggcttaacttcctggtgttgctccggtctttccggctgacgatgatatgtgcgtgcatatcgctgtcactttcaccgtcccggttgaaatggatctttgcataatattccacatcatcgcttttcaagccttttccgaagccctccgcatagtttctcatcacatcctgccgtatgtaccgccgtaaggcttccgcacactcctgcggagttctgcccatgcagcgcagctccttctctgaagggctgacagtgataacatagaactttgcgtcagtccggcttaacttagccttgttgttgtctatcttgaatgtgacctcccttgcgctcacgtagtcccggaactggttgaagaacggctgcacctcctcccctttcttcatcctctccaaatcctcatgctggagatagttcgtcaccgcaacacaactgcctgtattggcatatgtgccgttaccgcttccctgtatcttcacgttcatatcttttcccttttgttcttctcgttcttgtacaaggcttttatatcatcgaaaagcccggcttttcctttcgcatcgatatagcttgcgatataggagaagatcttctcctgcctttgcgtcacagcgtccagccttgcataaatggcttgttggttcttcagaagcatatccctcgactgaccgactgccttttccgcccggtccaaagcctgctcccttatcccggcaaggcttgcaaggtcacgcatgaataggtcattgtctttttggtattggctgaactttttttccgtaagtatcgagtccatgctcatggtcaccctcatacttgtactgcccatggcttcacaagccggacgcaagaaatcctgctcctgcttccggatgaacgctatcacctgatcacagcgtttgataagtttctgcatttcctttgccggactctcatgctcaaccgggttgatgccgtacttctcgaagtactccagcgcacaggaaaggaactctttctttgatacattattggactttgccagcctatcaagccgggcaaacgtttttcggtcaatggtgacagaagtggtggtttccttatccatacaattgcggttttaattgctgtttatattattaaatctctgatttccaaaggtatgattttaaccacaatttcaaactaattgcggttaaaaaacttaaacggctgatattcagccgtaaccccgtagggcaagaggaaaaacagggtaaagcccggtttcctcttgctgttctttcgactgccgagcaatcgacgaacaccctcccctgcggtacggcgaaagctcgtacaagggggacggggagaagtcggagcgaggcacaaagaaagaacctattccacaaacaaaaaaacacatcaaaacggcacaacaggctgcataaaatatcaatattttgtttcgctatatggaaacaaaatattatctttgcaacactaaaaaactttatatggaagcaaaatcaagattcaaggtcaaattatccaacgaagcccaagagtttttagacggattgcccaacaaggtacgtgagaagatcattagcaatattcgtaaatccacctttgtacttgatccagatttattcaagaaattggatgatacggatatttgggaattcagaacgttctataacaaaaccaagtacaggcttcttgctttttgggataaggacgataagataaacactctggtaatcgcaacacatgggtttatcaagaaaacccaaaagacacctcccaaagaaatagccaaagccgaagagattagaaaagattattttaattcaaaaagataaagcgtatggaagcaaagaaattttatacactcgaagaaatcgaggataaatacatcggagaaaaaggtactcccaaacgtgatgcctacgaagaagaacttaactcttttttgataggtgaagccattaaacaagctcgccaatcaaagaacttaacccaagaggaattaggtaatctgataggagtgcaacgggctcaaatctcccgaattgaaaacggtaagaatttaaccttttccaccattgcaagagtttttaaggctatggggataagtgctaaacttgaaatcggaagcatgggtaaagttgcgttatggtaactaactatacaacaaaaagttacattaaatccgggatgcgttttcgctcccggaaacttctcgttttatacattaaaagtcatatttatacaaaatttaacacgccaaaaaatcttcctaatccgttgcacttggctttacttgtttccactctctcccattctccggaaattcgtcgtatcaaaaaacacgctgaaaagtggagcgaagcgacctctataaaccaaaaaagaaacactccattgctttacggtaatttttagtttctttttagttacttttacggcatagcataacacattgtgctgtaatatcttacaaaggtcatctacgacaaatttccgagcatctacgacaaatttccgagcatctacgacaaatttccgaaaaaaacggttatctacgacaaatattctacgccatatatttgtttttgtcgtagataaatatttcctttgcgaaaagcattaaagtc

SEQ ID NO: 5 - DNA, 8329 bp, Parabacteroides distasonis
  source 1..8329: mol_type = genomic DNA
atggcaatagtaaacaaagaccttatccaaagttatattatgactactgcaaaatatgactttaatgtgtacgaaaagcgtatcatttatcgtctcgtagaaatggctcaaggagagctgcaaggtataaagttcgctgataactgtcagaagatagagcatgatcttttcagttgcgtaaatataaccatgcctatcgcctgcctgcttaatggagaggacgacaagaattatgcgagagtaaaagaagccctacagtcgcttcagcgaaagatctttgagtatgaagatgatgagatctggcaaagtatctctatcatagccttgccttatatacggaagcgttcttcagtattatcctttcaggtacacccacgtgtatgggactgcatacttgatttctcaaagggtttcaggaaatacgaactgaaagcagccatgagctttaagagccagttttcaatgcgcttttatgagttgttgagcaaccagaaaactcctctgatatactctatagaacagctaaaggaaatgttttgcgtaacagacaaatacgagcgcatcaacgattttatacgttatgttgtggatgctgcaaaaaaagagcttgatgaagtcagcccatatacctttgagtacacaccgctcaaaacagggcgaaagataacggccataaagttttatccggtatatcaaccggaacaccgtgacagtgatttggaaaaacatgaccttcaaaaacagactgctttaagctggtcgttagctccggaaataagaagttatcttaaaaactcgattgagttttcagataaagagattaaaaacaatctagatctgtttatatcagcacaaaccttacttccagacttccttaatgaactcgccattctaaaagggaaatcaagggaaaagaagaacccaaaaggttatataatcaatgctatcaagggaaaaattaaagacagaaagaaactttgattttgtcacacaatcaaaaaaacaaagacatgaaagaaggagatttgatattggtatcagctgaagctacaggcttaggaaagccaatggaagccattatagacaagattgagacattcatgggacaaacccttgtaacagtcacttacacgcaaccagacgccttatccggcttcggagggtgctttgtggattctcatatcactttaagcgaaaaaaaggccaagtaacctgaatatatttcaggaatattcggtatatttacagcatattcaattaaaaagaagcataaaaccagcatatcaagcatattataagcatatttatatcaatcggttaaggtatgacagataaagcaaccatacaacccaaaagcaagccggaaaagactacaatctcaataagcggagaaacatctgaacggctggagatatactgccgggcaaacggcatattacggaaagagttcgtttctctcgccctggaatactttgaacgcacaggtttcgacctgaagagtaacgcacttgattactcccccttggaaaagatcatcggagaattgaatgaagtaaaagcgaccatgcagacaagcaatgagggaacagaagcgattcgccaactactacaggcagtccgggaacagaccgcaaaacagcttccagctccagaacttatagcccaggcaacagaagcaaaggccaaagcggaaagtctggccgcagaacaggccaaagaactacaggttcttcaggaagaaaacaaccgattgcgtaacgaaatcaaagctcttcaggagtataaagaaaaagcacaccgggaactttgccgtgtacgtgacgaacaaaaaacaatagggaaaatcaaagtaaatacagaactataacttttaaagcaacaagcgtatgagtaacatttcaagaacaaaaattattagttgtatggctgttattatgctaatacttattatagcaacaggcttttttcaatacctataggtgtaagtgtatgctctatccttggtacaatatatggctataaatacaaagataaaagctttcttaaatggtcattagtagctttatctataggcatagcttctattatctacacccttatattgataaaatcaatgtaattttatattaacaataaatgaacgactttatattaatcattattctattgcctataatattcatgctgcatgaatttgaggagattatatgctttaagccttggatagagaaaaatcagtcatggcttataactaaatatcctctattttctaaattagtggctcatttaaacgagatgtctgtgccaacatttgctatgcttgttcttgaggaatttatacttgttagtattgttacaataactgcattaactttacattggtacaatatatgggttgctatatttactgcatttgctttccatatcttaattcatattattcaatggattattataaggaaatatattcctgttattataacatcacttcttgctttgccatatattttttggggactaaatactatcttaaaagaaattcctataaattgtattatattatattggatatgtggtgtattcgtaatgtgtatcaatttatatattatccataaaattgcatataaaagaactatataatttacatacccattccaaaaccccggcttttcttcctgggctggtcgagttcttcctccagctgcttcttccgctgcggtgcctggtcgatatatagaacctggaatattatactatttccctgttgttggttctcttcacgggctcttatttctttttgtctaataatgtttgggataatatatatctttcatttgcttttatcagaaattcttcgtattttatgaactcaggcagaggttctggtaatagcctattacggaagacgtgcatggttatgggcggttagggtaacttaaccgctttttcttttcaaattttctttgttaatagaaaatttctgtatctttgctttgtaaattaacgagaaagaagagaaaatgaaaaccgaccgcataacatcacctatacgcaagcaggggtttcgtgcttcgtaggacagttaagtggtaaatttaaagttcagttcttcgtggcaagttcagtggtaaaaatccctgcctgcgtatagctgagaaccgttatgcggcagcttaaaagacgacaccaaaccaaaaaaatcatcttgacaaccacccgactttgaactacgaaggatgaaatttttcagggacaacttccagcatttccaaaaaacagtttaaccattgacttggagacaaacaaacaatttgagcattaaggtttaaaccgaatttttccgaaattgacctgacctgacttttcctgaaaatcgactttaaagctgtttttacagataaatcaggtttctctaacagacaggaaataaatgctaagtatttggctttaaacttaaaatcaaaaaataagtgttttcttttaatgtttaacagggctgatttgacagttggcggtggcaagaaactttcaggacctacctcatagacaagtttcaaatcaaaaaaagtatgatagaaaacggtatatggattgtaaagcttcctcgaaaataacttttgtgtaggttctaattgaaggacaatggaacctcccagaaaatttccaagactctcaaacatcaggattttgaaaatatcggaagtaatgccataaggaatatttgacaccactttgaaaggaaatttcggaactgcaaaattcctaaaatcacaaccgacaacttgaacatttcgggcatcagaaaataattttcgtaaatgttcaaccaaagctgtgtcgttttcaatagcaacaacattgttggcgatttttaataaatgaacagtaagaaaccccttgcctgccccaatatctaaaaccgtatcctgattacttatatttgcttgtcttattgcatcttttattagcactttatcaatagtaaagtgctgacccgtaaaacgaacgggcaatttcttttttgtcattagtaacttcttacaggtgaatacttttcttataatgggttacggatacagatatagcatctgcatcataaacctcatgaataaatgataatagaaattttcccctcaaaaagagttgaaggtgataagaaaactgagattaggattcccagtatagactatgcacggattctaaaaatacgtgctattgaacaacgaatgctcgacatgatttgttttttgttctaaatttgatgcaaagataatgcttttctaaatctctggcaaggatatcagccaatcacataagtgattttaacgattcccgaatcgtaagcctcacttccggcgaacttccaagttgattctttgggctggttcgggaataaaggaatgccattgcctaaaatcacgggaatatagcagatttgcatttcatccaccaaatcgtgattcagcaaaagcgttatcacttgtccaccgccaaccaaccaaatgtctttaccatcctgttgctttagcgcctttactgtttctacaacattttccgtaatgaattttacattcttggtcggcgtaagatttgtgttgcggtgagaaacgatatagcacgctttgtctgaatatggccactcaaagtccatatcaagaactgcgcggtaagtcttcccgcccatgataatcgtatcaatggaatccatcaaatctttgtagccatattcggttccggtaggcattgggtatttggttagccaatctaaattaccatcagggcgtgcgatgtagccgtcgagcgatacagcgatgtacagtttaatcttttttttcatgtctctaaaatttaattgtttatactcgtgttcgctgtacatcaaaaaaaagcgtggaatccacattgctccggcataaaggtactggtatacccgacaaacgaaacacgcagttccacgccatacttgcgtatagcatgaacattgcacattccatctcgtttgtctaaaatttccagatccggcagcacccaaaacaaaaatacccctgaaagggtttccgataacaatcggctgtcctgaagatgtatatagcttcttcaggtattacttcagctggtttctccttcggtttaggtttcttgaaatacttatagccataccaggcaataccaccgaaaacagcccactgaagtacaaagactataatacggccaataatatcaatgacaaaggaaaggatatatccggctatggccagaaatatactacctacaataaacagaattaagattctgataatacctgtcattatgtcctttctttgttccatacgcttttgattttgttacagattcaaatttacatacccattccaaacccccggcttcttttcctgggctggtcaagttcttcctcctgttgcttcttccgctgcggtgcctggttgatatccggaacttgggaaatactgtttccctgttgttggctctcttcacggccttgttcctgatgcggttcctgaagatcccggctccattcggctttcatcttctcaagccgttcatggttcacacgttccgcccactcctttttctgaaatatttctttcgggcttccgttcttcatggtattgagatagtcgaaggtctgttccggggcccggtcataccctgtgcgcttgtcaaatgaagattcacactttcggaaaaaatctgtcctgtcaaaacctcccttcacgtttccgcagttcttcttcccggtgtggttggtctttgggcttaacttcctggtgttgctcctgtccttccggctgacaatgatatgtgcgtgcatgtcgtaccggtcggctcccttcctctcgaaatggatttttccgtaatactcgatatcctctttgttcaagccttttccgaacccttccgcatagtgctgcatcacatcatcacggacatactttctcatggcttcagcctgttccttctcggtcttgcccattttctccagctcccggctggaagggcttaccgtgatcacatagaacttcgcatcgctccggcttaattttgccttgttgttgtctatcttaaaggttacttcctgtgcgcttatatagtcacgtgagttattgaaaaacggctgcacttcctggccgttcttcatgcgctccagatcctcatgctggaggtaggtcgttactcctgtgcagctccctgtattggcataggtcccggaaccgccaccctgaatttttatattcatagtcccctcctttccttttccctctcatagaccttgtttatatcatcgagcagcccggtctttccttttgcatcgaggaaggaaactatatgttgcatggctttaagttgtgctgtttcattggcttctatccgcttaaaaatggcctgctggttcttcctgatagttgcatcagaatcccgtaccgctctttcagctctgtcaatagcttttcccttttcgctggattgattcattacctcgatgaaaagttcgctgttctccttcaggaaccgcctgaacttttcttccgaaagtaaggatgaaaggcttatggttatttgtgtgctggctccggccagagcttcacaagccggacgcacaagatccgtttcctgtttcttcaggaatgcgaacacctgatccatgcgcttgataagcttctgcatttcctgtgccgggctttcatgctcgaccgggtttataccgtacttctcaaaataatttatagcatgtgtaaggaactccatttttgacacattgtttgccttggccagacggtcaagtttagtaaaagtagtacgttctactgctaccgttgttttactgtctttttccatgatattataaggcttattataatgaattaatatactaacttattggtttacaagatagtatatttattcattataaccaaattatattggtataatttcctaaatagctgatttacagctaaaaaccccgtagggcaagaggaaaaaacagggtttgcccggtttcctcttgctgttctatcgaacaccctccccagcgcgaaattagcaaaggggacggggagagatagaacctatcccacacacgctaacacccacgaaaaccgcacacccggtacacaacagaattacccaacaaaaccgcacaacagaacatgtccggaacagcacaaaaaactcatcggtcggggagcgccgcacggcaagggggtgtaccaacactcccgacgagtgcagccgtttaattgggtatatgatataagttattttgattctgtcacaaattcaaaaggattgcagtaagttccaaaacggcacatactgcaatccttcatttgtcgtcataatgcccccaggctgaaatgataaacacaattacggtagtctcgttgaccatatacctgatacggttcttcttgtccagctgccttgaccagacaccctccaggtatctcaactgttccggatgccctgtacccgtgtacgggtgttcccggagttcatcaagcagcttctccagcttcctgaaaagctgcggagaggattttctcatcaacaggacatgttttaccgcttctttggaaaattctatctcatacattgccttcgccctctatacggttaagaaaatcatccagagactcgtttttagccattctgaaggtatttccgtttcggatatcttcaatacctctctggatggccgcaagttcttcctttgaagggaaatcaccttctctgactgcacacaccataataggggctgcattgcgtctggagaccaggatcgtttccgtctctgccatttcgaagtatttcttctgattggcacgaaattcgcgtgttgtaacaatctgcatagttctaatatattggttttcaccgcaaaaatagggataaaaatcaataaaacaaaagttttgtgtacttatttgtgtacacgcgcggaaaattcgttcctcaaagaacgctgcgctggcttttgctttgctttcacaaacattcaaaaactcgtttttcacggatttggaggtctggaagccacattcaggctaaaattttatgacttgtttttaagcattacttgttatatgcttatcaacttttaaaaaatgcactttaacaatctgacaaacagaatattacaatcatcaacagcgatctaactacgagtttttgaatactaactgcgagtttttgaatactatttcaaagtttaactacgagtttttgaatactaatcacacaatctacgagttttatttgtaaaactcgtttttaatacttatatttgcgcaaaacactgataatt

SEQ ID NO: 6 - DNA, 4785 bp, Parabacteroides distasonis
  source 1..4785: mol_type = genomic DNA
ctttgggagtttttaagacgaactttccctacactttgggagttttacccttctttttttgtttatatgtaggtattttatatctttgcagcaaatcaaatagttatgaaaaagaagctacctattaccaaaaataaagacgtagttgtatcatgggtatatacatggtccaaacagcaagacatgtccatacacgaacaaagaatagttcttcgcatactggaagcctgccaggctgaactaaagggagtaaagctgaaagattatgcaggcacgaaacgcaaatttgagcatggactttgggatgttgatgcgcaaatgcatgtgtctgacgttattttttccggacgtgactacaacgaaatcatagctgcactcgattcactggctggacgttttttcacttacgaagatgatgaggaatggtggaaatgtggatttatatctaacccgaaatacaaaaagcataccggtattataacatttcgtgtatctaatgacctttgggacgtgtttaccaaattcgcaaaaggatatagggaatttgaactaaacaaggctcttgcgctgcctacaggctattcacttaggttttatatgctcatgagtgggcaggtgtaccctttggatatatcactggacaacttaaaagaacgacttggcatacctgcggacaaatacaaagacaaaaacggaaaagatagaatcgacaacttcgaggaaagagtattaaaaccagcaaaggctgcgcttgatgaaagctgcccatacacattcaactacgtaaaagtgcgtgaaaaccctaacaacaaacgtagtaaagtaactggatttagattttaccctgtatatcaacctcaattcagggatgaagaactggaagtaaaagaacttcaagcgaaagtaacggcacgccaccaaatagatagtcatgtgtacgaatatctccgttattcctgtggtttcacttcggaagaaataaaccggaacaaggaaacgcttataacagcacaggaaaaaatagccgaccttataggagaactggctattctaaacggaaaatcacgagagaagaacaaccctaaagggtggattataaactctctcaaagggaaaataaaagacagctaagcaactaaaagtgcttccctaaatgtcatattttcaaatcattttctaaatttgcaattgtaatctttaaatatttattcatgaagaagaaaaattcactgttatttatactgctaatgtactctttgacaatgttagcacagaaagatataacaaaatttatgggaatccccgtagatggatttaaaaaagatatgattcagaaacttaaagctaaagggtttgaatacgacaatgaaatcgatcttttaactggtgaatttaatggcgaaaaagtaaatatttttatcgccactcaaagcaataaagtatggaggattgtcgtagctgatgcgatagaaaggaacgagcatgatattaaaattagattcaataacctttacgaccaattcaacgataaccctaaatacgttcctaaattggaagataacgattatatttctgaagacattaatcttgcatatgaaatgaaggttagaaacaaaagatttgaagctggattcatgcaaatgacaaatcccaaaagtcctcaaaactcaccagaaaagatacaacaagaattaactcaaaaaataagcgagatatgtccaaccgaagaatttataagaaaatcagaaaaagaaaaagaggacataaccaaagaagcagcaatgaacatcgtacaagaagctgcaatgcgctccgtatggtttatgattagtgaaaaatatggcaaattctcactaattcttttttacgataacgaatataataatgctcatggggaggacctctaaaaaacaaatagacgaagtacacttttgtacttcgtctatttgttgcccttttgttctattgcctgctcttggtaatattcgtaataccgtttgtagttgtcccgatctttggctgcatccacccaaagataacacatgaggcaagcgaacaaaagggaaataacagcacaaagaatggagtagaacgaaacccgtttatccacatagccaccatttttcattctattcccctgccgttcaaagtccgacaacacgttttttaggcgtttttcggcactttcaaggttctccccgtctatctgtacctttttggctgttgcgtcctctatgcgtttcgtataggcttccacgcgcttcaattcttgatataccagttctactgcaagctgcgggttcactttcggggtggtgtctttcctgcgtggtcggtattgtccttgcttagaggtggaaacctccttttccggacgtgagtttgtttccatgtgatatgctcatttggttatacttcaattttttctgtgtctgctcgatatgggcgagtgtgtaacctttcccaatctcgcttgccttgtattccgttccgctccgggctgtgacatagtagccgttaagttttccggtgcttgccctggcttcccgaactttgaatcccagtttgccaagttcctcttggaatttggcaaggtcaaagccctgcagcttcttcagtacctcgttcatggcttccttgatttccgctttattggcttttccgatgtcctgcgactgcacaaagtcccgttccttggctatggcgttggcggcttccgttgcccgtttccctatccagttgtcccgatagagttccccggaaagggatatccggtttgccagtatatgcaggtgcgcctgtttcttcttgctctccgtcccactgtgtttgatgatgatgtactggtggttcatcagtcccatgcgctgcatgaagtcgttgccaagttctgcccagtccgtatcggtgaagctggagctttcctctatcgaggggctgacctcaaaacgcaggcagttgttctttacgttcggaaaatcagtgaagtaaggtttcatctcctgcaccatttccgcacccgtacacccgtaaagctcatgccgagctatttcggtggctgctgcctgcccgtctatctctttggcgaggtcgtactccagtgccgccacgccatgtgatatgcttttccctttccctatcatcgtgagagtattttttggagttctgtgattagtgtccggttctcctcgaacacttcccggtactggcgaccaccgaagtagttgttcagtctctgaagtgtccccttcagccgggcgatgtcccggagaagttcccgttcttcttctgtgtacctctccctggggcgaccaccaagggagagactcctgcagtactccgatgtgctcagaccgcaccgggctgcctgctccgaaagtgccgccttttcaagtgcggagcatcggaaggttatcttttcgttccgtcttacttccatgccacgaagataggcaaaaaatctttttgagcaaagcgagaaaagcaagaattgtccgacaaggacacttcttgctatatatacacatgccgcatgggaatacacacaacgctgacacgctgcataggcacacatttttttctctttttcctgcctttttcacaacggaatacggagaactgtcaaggggacgggctggaaaaaccgcacgagcctgcgagcgcaggatttttccggatccggacttgcgaagcccttgacggttacggagtatggagttacatttgcagacaaaaaagagaaaaattacttattcagtaatactttttctttcgcggttaagttctccaattcttcatcacttataggaataacagtataggttttcccctcgtgatgaataagtacattgtcgcctttactcgccaaatcaagcatttcctctattcggttagcaaattcctcggatgtaagatttataactgccatatctttaatttttacattgtttttttacgtcatttatcgtcatagtgcccccaaacagaaataacaaaaacaacaatggtggtttcgttcaccgtatatctaatacggtttttcttatcaagttgccttgaccatacaccctgcaaatacttcaactgttcggggtgtccagtcccggtgtatggatgttctttcagctcatccaatagcctctctaactttttgaagagttgcggagaggactttcttagcaacagtacatgttttgcagcttcttttgaaaattctatctcatacattgcactcatcctctatacggttcaaaaaatcatctaatgattcatccttccgcattttaaaagttcgtccctgcttaatatcctcaatacccctctgaatagcctccaattcttcccttgaggggaaatcctcttccgtagccgcatatacgactatgggggcggcattacgacgggaaacaaagattgtctctttttcagccagttcaaaatatttcttctgattggcacgaaattcacgcgttgtaattatctgcataatatttatatatttgatttacaccgcaaatatagctataaaagttcaacctccaaattatttgtgtacctatttgtgtacacgccattaaaagccatattcaagcctaccgcccgttggttggtgttgctttgctttttcccctcttttcgagttgattttcagcctttttccctttaaattccccttgtctgttataagcatcgtctgtaatatgctctatcacttttgcggaaacaccgataaataaagggattaaaacatgtgtttccctacactttgggagttttaatcctaca

SEQ ID NO: 7 - DNA, 4148 bp, Parabacteroides distasonis
  source 1..4148: mol_type = genomic DNA
ctttgggagtttaaaagtaaattagtccccacactttgggagttttacccctctttttttgttttaatgtggggattgtgtatatttgcagcaaatcaatcgtttatgaaaaagaaactacctattaccaagaataaagatgttgttgtttcatgggtatatacatggtcaaaacagcaagacatgtccatacacgaacaaagaatagttcttcgcatactggaagcgtgccaagctgaactaaagggagtaaaactgaaagattatgcaggcacgaaacgcaagtttgagcatggactttgggatgttgatgcacaaatgcatgtatctgacgttattttttccggacgtgattacaatgaaatcatagccgcactcgattctttggcaggacgtttttttacttacgaagatgacgaggaatggtggaagtgcggatttatatctaacccaaaatataaaaaacgcactggcattataacctttcgtgtgtctaacgacctttgggatgtgtttaccaagttcgccaaggggtacagagaatttgagttaaacaaggctcttgcgctacctactgggtattcccttaggttttacatgttaatgagtgggcaggtgtaccctttggatatatcccttgaaaacttgaaagaccgtcttggcatacctgcggacaaatacaaggacaagaacggaaaagacagaatagatcattttgaggaaagagttttgaaaccagcaaaggctgcgcttgatgagagctgcccatacactttcaactacgtgaaagtgcgtgaaaacccaaacaacaaacgtagcaaggtgaccgggtttaggttctacccggtctatcaaccacagttcagagatgaagaactggaagggaaagaattgcaagcaaaggttacagcacgatatcagatagacagccatgtgtacgagtacctccgttattcctgcggcttcacatcggaagagataaaccggaacaaagagacattcataacggcacaagaaaagataaccgaccttatcggagaactggctctcctaaacggaaaatcacgagaaaagaacaatccgaaagggtggattataaacgcccttaaagggaaaatcaaggataagtaacaagattacccggctgaaacactccgggtaatcttgtcaaatcagaggaacgatttccatttctacaccaagttctttcatctgctgttgtatttcctcgctgcttagtttctctctcgccagtgcaagcccatgaaaggcgtcccagcctgccggcttcgaaacgatactaccgtttaggacggcatgggtgatttcgccgccggacttcgcacccttgttcagtatgaagaagaaccggggttcttcgtgttccgttgttcccataattcgtaaagttagatgtttatttattccccttttgttcccttgcctgctcttggtagtattcataatactgcttgtagttatcccggtctttggctgcatccgtccaaagatagcacatgaaacaagcgaacaatagggagataacagcacaaaggattgagtagaacgaaattcgtttgtccacataaccgccgtttttcattctgtacccctgccgttcaaagtccgccaacacgttttttaggcgattttcggcactttcaaggcttttcccgtctatttgtacctttcgggctgttgcgtcctctatgcgcttcgtatagacttcaacacgctttagttcttgatacaccagttctaccgcaagctgcgggtttacccttggcgttgtatcttttcttttccgggggctgtactgtccctgcttaacgttggaagctgccgcttccgggtgtgagtttgtttccatgagatatgttcattgagttgcacttcagtttgctttgtgtccgctcgatatgggcgagagtgtagcctttccctatctcgcttgccttatactccgtaccgcttcgggctgtgacatagtagccgttaagtttcccggtgcttgccctggcttcccggactttaaaacctctcttaccaagttcttccttgaatttggtaaagtcaaagccctgcatcttcttcaatacgccgtccatggcttccttgatttccgctttgttgactttgccaatgtcctgcgactgtacaaagttccgttccttggctatggcattggcggcttccgttgcctttttccctatccagttgtcccggtacagttccccggaaagggaaacccggtttgccagtatgtgcaggtgggcttgctctttcttgctctccgtaccgctgtgccggatgatgatgtactggtggttcgccaaccccatgcgctgcatgaagtcgttaccaagttccgcccagtccgcatccgtaaaggtggcgctttcctctatcgaggggctgacctcgaaacgtaggcagttgttttttacgttcggaaaatcaatgtgatacggtttcatttcctgcaccatttccgcaccagtacacccataaagttcatgccgggctatctcggtggctactgcctgcccgtttatctctttggcgaggtcgtactccaatgccgccacaccatgtgatatgcttttccctttccctatcatcgtgagagtatttttttgagctctgtaattagtgcccggttctcctcgaacacttcccggtactggcgaccaccgaagtagttgttcagccgttggagcgttcctttcaactgggctatgtcccggagaagctgccgttcctcctcggtgtacctctcccttgggcgccccccaagggacaaactccggcagtattccgatacgcttagactgcaccgggctgcctgctccgcaagtgcgtccttttcaagttcggtacaccggaatgtaatcttttcgttccgtcttagttccatgccacaaaggtaatcttaaaatctttttgagcaaagcgagaaaagcaagaattgtccgacaaggacacttcttgctatatatacacatgccgcatgggaatacatccacgccaaccgcccagcaaaaagccccggcgtgttagaaaatcccccacagcctaacaaattctaccccatttctacccaaggggattacacgccgcagaagtcatccgggaacatgtcttccagttcgtccaaatcaatggtttcttcttcggacacctccacccattcaatgttttctttccctcttatcgcacatgagtacatctcggcggcggcaagagaagagaacacctcgtgcataggctcgccgttctctaaccagtaaacacaatattcgaccataacagttttatcatttatcgttgtaatgcccctctacctccaagatgtagacctctaccacttcctcgtaaatgtcatagattatccggtcatgggcggtaatgtgtcgagaccatgtaatatccccaccgccccttaacgcttcgggatgcccaagcccagtcttagggtgctctaacaattctttgtagattttcttatacttcttgaacaaattggggtttgatttcttccatttggcaatcaccttatccaccccgtcggaaaccctaattgtgtacatcatagactatcgaaataagcgtcaatatcctcactgcttttgagggtaacacactttccggatttgatttcttcccttgccttgtcaatccttgcttgcagctccggggttatcatcaaatcttcacgaccaacttttaccaaagcgtaaatctcgtttttcctgcgaattagtacctgctcgccattgtcagctttggtgaaagacgctgcgaggttgttacggtattctcttactgataatgcttccatatctgtttgcttttaaattcagcacaaagatagctatatttcaataaaatacaaacattttgtacacaaacgtgtacacgccataaaaacccgtttccaatcctaccgcccgttggttggttttgctttgctctttttccctatcgtttttctttttccgacagtaaatcaaccacttagctctataaattccccttgtctgttataagcatcgtctgtaatatgctctatcacttcttcgcaaacgcccataaataaagggattagaacatgtgtttccccacactttgggagtttagtccccaca

SEQ ID NO: 8 - DNA, 2877 bp, Parabacteroides distasonis
  source 1..2877: mol_type = genomic DNA
atatggctgcccaatccgccggctttaccggctgttcctttttcgatgtgaagtactgcgaatcccatttcttttccctattgtttttttggtttagtaatgcaatcaaagagggcggaagccctcccctttcggcttgtccgaaagcccacacttcggaacgaagtatagtgggctatacttccattaacgaaagcgcacaacaaaagtaggcaaaacgcttggaaattccaaatgctttgcctacctttgctgctgaccaaacggtagccgaccgatacgggagagctgctgacattaaaaagccgctggagtgaattgacggattcccgacatctccagcggcttgatgtatgtaagggtagaacggcagggtttgaacctgcaacccctcctctaaaaattgagtgctctgtccagttgagctacgtttacccttagttccttattttgctttttgggcttctttcttgtcttggtggttgaagtaaaccactccgacaatggctattactgaaacaagtccaaacattaccaatgctcccatgtttattctcctttctttttgtctttaacaagccaaagacctgctaaaagggttactactattgacaacgaacctcccacgtatattacccacttttcttgcacatccccgaaaattgaagaaagcacgactgccgtagttatatacttggcaatgtccattagccattttcctaattcttttttcatactgcaaatataataatttaattggaattattgtttatccccctcccgtcccccaaagggggagcgaccaaacggcagcactcactcaatggagtgttgctgttctttagtcctcaaaaggcagttgtggtaaatctccttgttctttcatcacatctattgtacctttcagctttgttgatgtcgtcttatattgtggataattttcattaatgtaagttgttgcgaatgttaccctatcaccgttaaatacgcacatgggatttatgtagtattcaatatccgctctacctcttgctattatttcggcactgcaaagctcgcctaaagctctaaaaatggatacttctgaataccctgtttcttccttgcattcgtccataaaaaacataaagctgtcttgattaggttttagttggccaaggatatatttaaagactttgattgatgcaggctttaaatcaaaaaaagccttgaatcctgctaaaaagaacttcgcaaaactttctgtatctacggctttatttcgtataaatacagaattaccaagaatttccccattaccgtcaactgcttttagaatggctgattcatctttatttgttcccttaactgatttagaaacaagtgcactccctatattaactaatgcttgttttgcaaagggattttctttgttaagctcgaaatctgatagtttacgctttgtcatactctactttcattttcatggtgatttttgatagtaacagtaacattgaatgttattattactttcacaaagatagtaaaaaatgaaagtaatagtttcttttaatgtgttatttatgaaactttcactttcttactatgaaagtcccactttcatagtatgaaagtcgcctatattgattatcaataacttatgctatgtttctttcttaagctcttaaatacccccaaaaatgccattttttagcttattttctttcatcttctgcactttcaaaaattacccaaaaaatgaaactaaaagagccccttcaaaagaggggctctccacgtccacgtttgggtaagttttgcgttttaatgcaaccttaaaatttcagttcttatgaaaaaaaccttctgttgttgaaatgctcatccccaaaatagaaaaacaaccccaaaaaagcaaagagaaacaagggtttaacattgagcaacactccattgagtgagtgctgccgtttggtcgctcccccttgggggacgggagggtgttaaagcgaatagcctttgttatgtctgatatacctttcgggatgcagctttttgtgctgttcctcgataacccctctaagctgtgcattctcttttcgcaagcggtctgccttttcttcggcttgcagcttcgagttctggaagtattttagaactttctggctttgtttctccgcttcgtgcttgtaatgctctctcatttgggtaaaatcctcgtaaatcgccttattttgcttctcagcccatttttcacgcccgattaatggcggtgtgccgatttggggtgctcttgtttcgtaattcagctccatactgttactcggataaatgagccgttcctctatcctgccgtaatactcccttacactgtcatgggtggcggtgctgcctttaatacccctctgaagcccgaatttgttctgcatgacttttccgtaacagtcctgcaactccgacagcttgcgtctgtcacccatgacctctttggcggaaagtctgccgtccacggttaacggcacaacgacacaatgaatgtgcggtgtccgctcgtccatatgtagggtgaagtccacaacgtttctccccccgaaccgttcgctgacgaacctgtagttctcgttcatccattgagtgagcctttcgggattctccccgatagctgtcatttcctcgtgacttcctgtaagaactacattcaggtgggtaacggcatccttgcggatggctgtctttcccttgtaaccctcctgtatgcgtctgttgattctttcctgtaatgaccttcggttcttgaaattgtcatagacatagactttcccattctcgcccaaatggtaaaatagatttttttccgaaagtttcggatctgcattgaggactttctttgtccggtct

SEQ ID NO: 9 - DNA, 2783 bp, Parabacteroides distasonis
  source 1..2783: mol_type = genomic DNA
cataccaatacctctactaaaaatgtacttcaaagatacttattttctaccgacttgatagtttttaccccatattcttggacatttttcccccatgaggttatctttgtagggtgaaagagaaacccataaacggggatagattgaatgctgggaagcataaacaatcggggtaaggttagcgaaccttgcctttcatcccccattataactttacatagaggaactttatctatccccccccgcccccaaagggggagcgaccaaacggcagcttcactcaatggagtgttacagttcatcaaaaccaagtgataactgtcgtttctctgcttcttctttcttttgggcagctaaagtctttttccgaacgtatgtttttgtaaatgaaaccctatccccattaaagacaatcaacggattaatgaaccaattatattcgtttggacctcttgctatgatttcactttgtacgagctctgccaatcctttgtatatggctttgtctgatttgtattgggtgtattctaagcattttcgcctatcgaaaattatcatatcattcttaggcttcatgcaagttagaatatacccgaaaacccgaatagctgattgtgatagattgaaaaaagcggcaaaattcgcaaggtatagttttgcaaattgctcttcatctacttctatttgtcggataaacgaggttttgaatacttctcctgtatctgtatcagcaacagcaactacagcttttttatcacttcccgtactacttttgtatttcttaacaacgtgattttcaattccttcaattgcttgtttcataaaggggttttcttcgtttttttgaaaatcggttaatttgagtactttcttattttccataaacattctatttaggcaaatttgactttctatatatcggtgaaaaagtataatttgattttccacaaaggaatatttaaatttccattaatacaataaaaaagcaaaatatattttcctttttaacatctaataggaaagagtgactttctaatatggaaaatcagattttccaatatggaaaataccctatattgagtatcaactacttaacttattctatttcttaagttcttattataccctaaaaacggcatataatcaactacttaaaaaatcatcggtcggggagcgcccagcggcaaggggcgggaccacccgtcccgacgagcgcccacaccataaactttttttcgaataagcacacaaccgtttttcgaaccctgcaaaatttcttccgaacccgaacggcgtaacactccattgagtgaagctgccgtttggtcgctccccctttgggggcggggggggttacatacccatgccgaaacctctgcttctggtgatttgcttgagtaggtctttcccctcttccatagcttttgatatgtttgggaaatgatgccttaaagcctccagttgttcggaattgaacaagtctttcatcttaccaagttcttttttcaattccttggtttcggtctttagttcttggttctccgttcttagtcggttactggttgtccttgcattgtccatttgctgtctataatactccttgtcgttctcggctttgaatacctttgtgccgtttcgctctttttcaagtatagcctttcccagtctatcggatagctgttcattttccccctctaaagcctttattttggcttttaaggcatctttttccctatcgttaaccgttttccctatcaagccgtaaaacttctctgaagccttagaaatgagtttttggacgtttttctttgtttcaatggaacgtagttctttctgaagctgaagaagctggttttgcacgtccttgtgcttgtctaacgcactggatatatcgttggatagttcctgaagctgttctttcgcacattcggtcttgtactgcatagccgataagtgtttgcgatcagaagaaacaccacgttccatgcccagtgcttcagatgctatggtttggagttctgccatgtcatcacgcgataaacgcacactcttcccgttcggctgcgtccaatcgaaaactacatgggcgtgaaggttaggtgtccattgctttgcgttcatgtatccttcgtccttgtgtatatggatttgaaacgcttcaataccgaaacgttccttgcagaccgcagcgaattgctggagttcctgcatggtggtttcttgcttgattactattaccccctcccgtatgggtgctgctttagtctgcatcttctgcccaaccgtatcgaaatatctctgtttcgcactctccagccgatgggagatgctatctccaacccagctttcattcaaatgactaagttccggacgaacatagtccaactctttttccctaaagttgtgaatctcgctccccggcttcactgcttgtacatgaatacttgttgctcccataagttaacatttttgtgacaatcgataacagccggtgacagccggctgacagggggttaagggggcttgtccccttacacacgtaccctttagggtgctagtgtgctatcaccatactgcataggtgcgaagttagtgaatgttttgtaaatgcacaaataaaggggaaaacatttggatttgcgacaataaagtactacctttgttgctgaccaaacggtagctgaccgatacgggagagttaccaaaatacaagccgctggagttaattgacggacatccgacatccccagcggctttatttttgcctatctgcttcgtctagg
